United States Patent Application Publication US 2026/0258423 A1 - sequence listing, part 58

SEQ ID NO: 301568 - DNA, 83257441 bp, Homo sapiens (residues 40,561,334-42,696,140 of 83,257,441)
  source 1..83257441: mol_type = genomic DNA
gaaacatcacagggaaacttaggggaactcttgtatgtggcaaaagggagcctggtcagtggccttgagtcagatcatccctgtctgttacaaagtcataaagaaactggtcttgggcagcagcttcagtgagaccaatgaagttgggaatctctggggctaaggagtggttgacctagatgttgggtgttttctgagttcttgagttttcagtaatgatcatcatgaaaattccctagaactccaaccggagcccccaacatgagagactgcccatccaggaaagaaaattattggctggctgcccccatctccaaaccatgaacttccatccccacatttttccaggtcctccagactgcccaggaaatcacagttgcccaatcagctcgccccaagagcgaccccaagctttttcctctttgaacttcctcacctgccaacacaacttttctctctctctctttttttttggataagggaggcagaggagaagcagggaggtggtgagaggtctagagatctggggaatccactttcagacagtaggcagggatgggtgagagcctggtagaccttgcattttctatgttatcaactgctgtatccaatgagataattcatattcactgagctctcactgcgtgccacactgtctgcatgtatggtctcatttcatcctctcaaaagccccatgaggtaggcgctactattatccccatttaccaatgagaaactgaaacacagcaagtaactttctcagagtcacacaatggccagcaggggagcaggctttgaaaccctccaactccagcaaccacactcctaaccatccttctgtgcggccactgggtctgtatgtgtctctccctcataacatctcatgagctaccctggtgatcctcatcttagattccagaaaatagaggcccagagagattaagccaaatgcctggggccacacagctgctaagagagggacctgagatttgaacaggatagcaaggtttgggctctggctactgcatcaggctgtgtttctgatgagcctgctgcatctaggacgctccacggagcatgaggggaatctttgctccccatgccccactggccaccagtgcttcctgcttccatcccccaacatcccggcccccaaaagagccggccccacctctgttctgacacgggctttgctgcctctttgctgccacagaactccttccaaaacacaaatctcatcctttaattcacctacttgaaaaataaaaatctttgatgggtccccattgttttcaggataaagttcaaattccttagggatgccgtaccacgttttaaggattgggtctcctgtgcctgcgtccttcctcctcatcttcctccttggcatggccagctactccaccctcccctccgcttgcttctttcttgtctctgttactgttgtctcagctgaccatctacacggctgcagccttagtccccaggacactctgcttgtcagcatggagtttttgaaataatagatttgaatgcctttaggtggggcatgcaccctctgggtcactctactcccctccacttcctgcaccttatgcccattccctctattaccttgtcggcctctgatggcaatggagtttgccattcctgccacatcctgggcccattgcagctccttgttgggcttgacaactcctacacacccttgaaaacccaccttaaatacctctctgacccaggttcactattcccttcttgtcttgcccttgccctggtcaatgctgtatcttattctgttgcagtggctttgtgacatatgtgtcactctccccaccagactggtcatccctgaatccctcaaacaatgagagttgcctgaatgtccgaagcaaagaggagagattttttccaacagcgaccccaggctgcagcgttcctctcctccccagccaagtttctggcaggcaagaaactggccctgaattagcttcagcatccccctttgccaccatttatgtccgagctgtgaggcacacatctctcatgggttcattttttccttgctttgcttttgagaattatgaaagatcttcggtctcattgctcgaaggtggggagggtgcctcagagctgctcattcaaaccgtgaaaaaggccagctcagccctgcttgggagttttcattttgtgtaacagaaaccctccctcctcacccacctcttgctccttgctgggcagatgaagagcagaacaacagatcctccaaggcccacccaccccatcaacggcccagagagcccgttttgagtaaagcttgtcagcggcttcccctcctaccagtatttcgggtttgaccgttggggctctctcaagttgagtgaagtggcaagaatatcccttcttcctggaccagagattaccctctctccctgcatcaaagcctaggagtctagcacccctaaacctagtctggggtaagacactctgcacatcttcccaaccccctgttcagtcatgtagatggcttgaaatcaatcagccagggtgggagaatttacaccatggaaattggcaagcactacaaattcaggactttccctccaccctggagtcagctaccagtgctccaccccggggagctgcttttcaaatgcccagtagcacaccactgggcactgcttggtttccttcctggaggccagtatgaaaggctggagcagggtcttctgtgggtgacgtctgtactgtgggattgtgatggggggtggtggagggggtgcaggggagtgggatttaagggtagattggctgggaaatgaggcatttggaagagattttcaaaaactaaactctacggagttcttgatacggtgtattcattcattccgcagacattttctcctcacatcctcaaagcacctgaacctgcctttcaggagttcacagtcagtgggtggggtgaccactttaaccctttcacagctgtttgctgggtccagatccagcgttcagggcaggcgggaaagtaagagatgaaatcaaggaggctgtggtgtggcgaggaggggtgtgaggacagcaccagggaaccttcactttttaaagccaaccctttgcggctttgaggccgccgtggtgcattgtttgctggtgagacaagccatctaggaacctggtcttcttagcctcagcctggtctgactccacagctgagatttataaagggggcgtctggagctggatgaaccactcagaacaccctcagtgcttccccttgaccccttctaggttagacctgagaaagggctttctaaagagtagagttatctgccggggcagagtgcgtgaggtttgctcaggggcaggggctgtgctgaaggcctggctatgatttctccaagctgagtgccccttgccatcccattccatgttgcctgcccgttccttaacttgcaagaggcaacagcaaagccagatcaaagcaggtgggatgtgcagcagagagaaagcaaccagagcttgcatttgcaatgcaccgcaccattctcacaacccagtcacgtttcatttgcatctcctcatgaccccaagtggacaggtatatgaatatttggcaggggagaaaggtgggaatcagagagtgggtaaaaggtcctaagctctctagggagaatttctctgttgaaacctgtccccagaggtcccagagggcctaacctatcaccctcatgatgagaacaggttctgccagaccaccaagcccagccccgccactctcttatgtccctgctgttttagaaagacatgatctcggcccctcccttgtccccactggcaccaaaggctgaccccttctccaggtctgaaagggcaggtgcacccctcctgggacagcagggggcattctctggaagtagcttccaatgcccaccaaatcagaactgatttctccaggaagcacccctatgcgctccacccgcatcctccacccccattccacagggtcagtctgggtgtccaagaccctggtactgttccttctcacatgaagaggctcactcacccaggtccatgacgctctctgggcggtaaaaccacacaggaaggctgtgcccggcctcgcactacccctgtctggggaggaagtggttcaagccccttttaagttgtcggagaagccaccctcttccctgcccctcccacccttgctcctccccccagccctccctgactcatgcagggccccttcaatgccttcagagataaaggggcagaagaaaggtgacagagggtgacagtcgctggtcataggatcctgaatcattaggtcatttacattcaaaaagccccctgcgctgcctggcagaatctagatgaggggccatttactgattcaacaaatatttatagcatgaatatcacatgccaggccatgggttagatgttggggagtcagagatgtgtgagagaagtgtccccatccttcccttgctctgctcagtgtcacagtggaatatagtcccaaatggctttccctctggcttctgggtagtttaggccaatgggaggcactgacacataatgacaggtaaaagggaagagatatgccacgatgtatcttttttctccccccttcccctcccctcccctccctcccctttccctcttctcccctcccttccttttcctttcttaatgacagctttattgagctataatccacatcccataaaatttacctttttaaagtatagaattcaatggtttttgtatgttcacagagttatgcaaccatcaccacaatacattttagaacattttttctcactccctctcaagaaccctgtaatcactagcaatgactgctcccctcccctcctgtcatcgaaagcccctggcaaccacaaatctactttctggctctatagattttcctattctgaacatttcacataaatagaagtatcaatatgtgaccttcacatctggcttctttcagttagtgttttcaaggttacctatgtggtggtatggatccattccccattcctttttatggctgaataacattccattgtatggatatgccacattttgtttgtctgtcatcagttggatgtttgggctgttttcccttttagctattatgaatgatgctgctataaatatttatgtgcaagtgtttgtgtggacatatgctttatttctcttgggtatatacctagaagtgaaattgttgagtcatatggtaattatatatttaacattttgacgaactatcaaactgttttccaaagtgactacaccattttgttcccatcaacaatgcgtgagggttccacattgtcaacaaaacttactattgtccattcttttgattctagccatcctagtggctgtaaagtggtatctcattgtgttttttttcttttttcttttttttttttggagatggagtcttactctgttgcacaggctggagtgcagtggcacgatcttggcttactgcagtctccacctcctgggttcaagtgattctcctgcctcagcctcccaagtagctgggactacaggcacgtgccaccatgcctggctaatttttgtatttttagtagaaacggggtttcaccatgttggccaagctggtctcaaactcctaacctaaggtgatctgccagcctcggcctcccaaagtgctgggattgcaggcatgagccaccatgcccggcctctttgtagttttgatatgcgttttcctaatgactacctatgctgagcatcttttcatgctcttattgaccatttgtattattttttgagaaatttctattcaaatcctttgcccatttaaaaaattgggttatttattttttattattgagttgtaagacttctttatatattctggttacaatcccttatctgatacatatctgtaaatattttctcccttactatggatcatcttttcactttcttgatagcgtcctttgaagcacaaaggctttttgttttttaaaacctgaatctctggcaaaagaagcgcaaagttttaaatgtggaggttcaattgatttatttttcttttgtcaattgtgtctttggtgccatatctaagaaaccattgcataattcaagtatacaaagatttattcgtatatgttcttttaagacttttatagttttagctgcaacatttagatctgatccattttgagctaattgttgcatatggtgtgaggtagggatccagcttcattttttatatggatatctagttttcccagcatcatttgttgaaaagactattttttccaccattgaactgtcttagcacctctgttggaaatcaattcatcataaatgtaatggtttatttctagactatcaattctattttatcaatctctgtgtctgtcctatgacagtaccacactgtctcgattactgtagctttatagcaaattttgaaattgggagttgtgactgctccaactttatctgtctttttaaacattgtttgactaatctgcatctctctcttttccatatgaattttaggttatcaatttctgcaatgaaaccagctgggattctaataggaatttcattgaatctgtaaatcaatttagggagtattgccattctaacaaagtcttttggtccatgaacatgggatttttttcatttatttaggtcttccttaatttctttatactttttaggctgcaagtctttcacttctttgttaaattttttcttaagtattttactctttttgatgtgcttgtaaatgaaattgttttcttaattttattttcaaagatggccaactagaagcaggtatggggcatggctctctcagagaggaacaaaggggtgggtacttcaaaacctttatctgaaacatccagatacttgcattgggactgattaaggaatcagctcgacccacagaggatagaggaaagcagggcagggcaatggcctacataggagcaacacagacccaaaggaaaccccctcccctccccccaccagggaagtggtgagtgaatgtgcaaacctggggaatgatgcttctcccaccgatctttgcaacctttggatcgggagatcccctgtgaacccactccaccaggcctttgggtcttacacacagagctgcattggattattggcagagcagctgctcaggcatgcacagacacccaggagctttacatactcaggctccggaaccccagcaaaggtgaccgccattcaggcaaggcaggaggtctgtacatacccctaggaaggaggctgaatccagggagctgagcagcattggtctgtgggcctcacttccacagcacctcaccagataagaccaactggcttggaattccagccagccacgggcaacagtgtagcacctacctgagacaaggtggagttctgggggtggctggggtgggggtgaggggcaccacctttgctgtttggacgactcagctgttccagcctgtagactttggagagtccaaacccaccaggtgtggaaaggatcccccagcacagcacagctgctctgccaaaacgtggccagactgtttttttaagcaggactcctatccattcctcctcactgggtgggtcttcccaaacaaggccttcagccacctctgcccattttctacagcccataaaattttgatctctccctgggacagggtgcctggatggtggagagggctgccacctttgctgtttgggcatcccagccattccagcctttcagctttggggagctcaaaccaactgggggctgaaaggatctcccaacgtggcacagctgctttaccaaaatatggccagactgcttctttaagagggtccctaatccattccttctcactgggcaggacctcccaactgtggcctccagccactcctgtcgatgttctctggctgacagagatttgaagacttcctgggacagagctcctcgggggaggggcaggctgccatctttgctgttttggcgacttagccacaccagtctccaggctttggagatcccaagccaactggggatgcaagtggtgcccagcatagcatagtttctcttcggaagtgtggttagattgcttctttcagtggctccccaatcctgttcctcctgactgggtgagacctcccaaatggggtctccggccatctcctacaggtgtgtttaggccagcaataggttcatacctccctgggatggagctcccaggggaaggggcaggttgccatttttgctgtttcacagccttcactggtgatacctccaggtactggaaaatccaaagtgactagagtctggaggggaccctcagcaagccacagcagctttatggaaaagtggccagattgttaaaagaaaaacaaaagaaaccccaaaaccccatccaaaggtcagcaacctcaaaaatcaaaggtagataagcccacaaagatgagaaagaatcagcataaaaacactaaaaactcaaaaagccaaagtgccttcttccttccaaatgactgcagcatctctccagcaagggtttggaactggggtaaggctaagatcactgcaatgaaagaagtagacttcagaatgtggataaaaatgaacgtcgctgagctaaagaagcaagttgtaacccaatgcaaggaagctaaaaatcatgataaaacaatgcaggagctgacagccaaaatagatattatagagaagaacataactgacctgatcgagctgaaaaacacactacaagaacttcacaatgcaatcagaagtattcatagaagaataggccaagttctgcttagtcttcctctgaaagattcttcctctgaaagaatctcagagcttgaagactgtctttatgaaataatacgggcagataagaatagagaaaaagaatgataaggaatgaataaaacctccaagaaatatgggattatgtaaagagacggaatctatgactgattggggtatctgaaagagatggggagagtggaaacaatttggaaaacatatttcaggatattttccaggagaacttccccaacctagctagacaagcaaacattcaaattcaggaaatgcagagaaccccagtgagatactccatgagaagatcattcccaggacacatgatcatcagattctccaaggtagaaatgaaagaaaaaatgttaagggcagccagagagaaaggctaggtcacctacaaagggaagcccatcagactaacagcagacctctcagtggaaaccctacaagccagaggagattgggggccaatattcaacattcttaaaggaaagaaattccaatacagaatttcatatccagccaaactaagcttcataagcgaaggagaaataagatcctttcaggacaagcaaatgttgagggaattcattaccaccagacctgccttacaagaactcctgaaggaagcactaaatatggaaaagaaaaactgttatcagccactacaagaatacactgaagtacacagaccagtgacactatgaagcaaccgcataaacaagtctgcaaaataaccagctagcatcatgatgacaggattgaatccacacataacaatactaatcttaagtgtaaatgggctaaatgccccaattaaaagacacagagtggcaagctggataaaaaaccaagacccattggtatgctatctgcaagagatccatctcacatgcaaagacagacataggctcaaaaagaccttcaaatagacttagactcccacacaataatagtgggaggttttaacaccccattagacagatcattgagagagaaaattaacaaagatattcaggacctgaactcagctctggaatatatggacctgatagatctctatagaactctccattcccaaacaacagaatatacattcttctaatcaccacacggcacttactctaaaattgatcacataatcggaagtaaaatactcctcagcaaatacaaaggaactgaaatcataacaaacagtctcttgggcaacaacacaatcaaattagaactcaagactaagaaattcactcaaaacaacacaactacatggaaattgaacaacctgctcctgaaggacttttgggtaaatcatgaaattaagggagaaatcaagcagttctttgaaactaatgagaacaaagatacaacataccagaatctctgggacacagctaaggcagtattaaggagtaaatttatagcactaaatgcccacatcaaaaagctagaaagatctcaagttaacaacctaacatcacaactaaaagaactagagaaccaagggcaaagaagtcccaaagctagcagaagacaagaaatgaccaaaatcagagctgaatcaaaggagatagagacataaaaaaaaaaccattcaaaatatcaatgaatccaggctggtttttcaaaaaagttaataaaatagatagactgttagttagactaataaagaagaagaagagacaactcaaataaatacaatcagaaatgataagggagatattaccactgacctcacagaaatacaaacaaccaccagagaatatcataaacacctctatgtgcatagaaaatctagaagaaatggatacatttctggacacatacaccctcccaagaccaaaccaagaagaaattgaatcccagaacagactgaaaacgagttctgaaactgaggcagtaataaacagcctaccaaccaaaaaaagtccaggaccagatggattcacagctgaattccaccagatgtacagaaaagagtaccattcctacggaaactactcaaaaaaattgaaaaggagagactccttcctaactcattctgtgaggccagcatcatcctgataccaaaacctggcagaaatataacaaaaaaagaaaacttcaggccattatccttgatgaacattgagcaaaaatcctcaacaaaatactggcaaaccgaatccagcagcacatcaaaaagtttatccaccatgatcaaatttggcttcatcatcccctgggatgcaaggttggttcaacatatgcaaatcaataaatgtgactcatcacataaacagaactaaagacaaaaaccacatgattatctccatagatgcagaaaaggcctttgataaaattcaataccccttcatgttaaaaactcttaataaagtaggtgttgaaggaatatacctcaaaataataagagccatatatgacagactcacagacaatattatactgaatgggcaaaagctggaagtaagccccttgaaaatcaggacaagacaaggttgctctctctcatcactcctattcaacacagtattggaagttctggccagggcagtcatattcagggaagagaaaggaataaagtgtactcaaataggaagagaggaagtgaaactattcctgtttgcagatgacatgatcctatatctagaaaaccccactgtctcagccgaaaagtttcttcagctgataagcaagttcagcaaattctcaggatacaaaatcagtgtgcaaaaattgctagcattcctatacaccaaaaacaggcaagcagagagccaaagcacgcatgaactccaattcacaattgccacaaaaagaataaaatacctaggaatacagctaacaagggaagtgaaggacatctacaaggagaactacaaaccactgctcaaagaaattagaaataatggaaacaaatggaaaaacattccgtgttcatggataggaagaatcagtattgtggaaatgacaatactgcccaaagcaatttatagattcaatgctattcccattaaactaccattgacattcttcacagaactagaaaaaactatttaaaaattcacatggaaccaaaaaagagcccaaatagccaagccaaccctaagcaaaaagaacaaagctggaggcctcatgctacctgacttcaacctatactgcatggctacagtaaccaaaacagcatggtactgatacaaaaacagacagacttatggaacagaatagagaacccagaaataagactgcactcctacaactacgtgatcttcaacaaacgtgacaaaaacaagcaatagcgaaaggattccttatttaataaatggtgctgggataactggctagccatatgtagaaaattggaactggaccccttccttacagcatatacaaaaatcaactcaagatggattaaagacttaaatgtaaaactaaaaactataaaaaccctagaagaaaacctaggcaataccattcaggaccaaggcacgggccaagatttcatgacaaagatgccaaaagcagttgtaacaaaaacaaaaattgacaaataagtaaattaagggatctacttaaactaaagagcttctgtacagcaaaagaaactatcaacagagtgaacagacaacctacgcagtgggaaaaaaagttttgcaaaccatgcatctgacgaaagtctaacatccagcatctataaaaacttaaacaaatttacaagaaaaaaaaattaaaaagtgggccaaggacatgaaaagacacttcacaaaagaagacatacatgtgacccagaatcatattttgaaaagctcaacacactgatcattagagaaatgcaaatcaaaaccatagtgagagaccctcttataccagtcagaatggctattatcaaaaattcaaaaaataacagatgctggtgatgtggagaaaaaggaatgcttttacactgttggtgggagtgtaaattagttcaaccattgtggaagatagtatagaattcctcaaagacctagagacagaaataccatttgacccagcaatcccattcctgggtatatacccaaaggaatataaattgttctattataaagacacatgcacgtgtatgtttattgcagcaccattcacaatagtaaagacatggtatcaacctaaatgcccatcaatgatagattggttaaagaaaatgtgctacatatacatcatggaatattatgcagccataaaaaggaatgagataatgtcctttggagggacatggagggagttggaggcctttcctgtgtccactgagacaattgagtgtttttgccctttattctattaaatatggtgtattatatgaattgatttttttatattaaaccaaccttgaattcctggaataaatcacttggtcatggtatacaattttttttgtaatgtttctggatttggcatgttaatattttgttaagaaattgtgcatctatcttatatgtgtcttatgagagatattggtctgtacttttcttgtgatatctgtatgtggttttgatattagggtaagtctagttaaatgtttatcaaacttatcaatctttttgatataacaacttttgggtttgttaatttttctctagtttttccaattccatatttcatttttttccattctaatctttattatttccttccttctgcttgatttgggcttggttcactattctttttcttaaagtgaaaagtttttttttaatttggtatctttcttcttttaaaaaatacaggcattaatagctattaatttctctgtaagcactattttagctgcatctcataagttttggtatgctgtgttttcattttcattcatttcaaagtattttctaatttcccttgagttccttgattcatttccacatacttatggattcttcaaatttccttctgttactggttgtggtcagagaacagactttgtctgatctcaattcttttacattttttgagacttgttttatgtcctaacagatggcctatcctggagaatgttctatgtatatctgagaagaatatgtattctgctgttgttgggtggtgttttatagatagacgttaggtctagttggttcatagcattgttcaaatcttctgttttcttgttgatcaactgcttagttgttgtatctattattgaaaggaggatatttaagtttctattattgttgaattatgtgtttctcttatttcttgctttatgtgtttctcttatttctttgacaattctgtcaatatttgtttcatatatttttaggctctgttatttaggtgcatatatatttatagttgttatgtcttcctgatggattgactctttttgaaaaattttcatcctttttcttagagacagggtcttgttctgtcacacaggctggagtgcagtggcacaatcatactttactgcaaccccaaacgcctggcctcatgcagccctcctacctcagcctcccgagtagctgggactacaggtgcatgacaccatggttggctaatttatttaaacaattttttttttgtagagatgaggtcttgctatgttgtccaggctggtctcaaactcctggcttcaaatgatcctcctgcctcagcttccaaaaatgctgagattacaggcatgagccaccacacccagcctggattgacccatttatcattataaaatgtccttctttgtctttataaacaaattttgtctgaaagtctattttgtttgatattagtctagcatttttgaatgacatatctaatatacatactactactttttgggtgttatatctttttccattattagaatgtttcttttctctatgctttcattggcatcccagcagcagctacaagtctttgattccagagtccatcagccagcccctaccactgtggtaccagcacttgataagtaacccccatcatggttccagctcctgccccagtttctgggttttggtaacataaccttctccctgtgtccctccagctctaggggtggtggcaacttcctgcggttattaatctctgggtggccttgccctcccttgtttggcttcagctcttccatcacctgtataactggttctctatgttaaatttcttctgtttggaatacctagagtggctcttgtttgctttgactctgattgatacaaggtgattactgtccccaaggagtttaagttatagaagaagttaaggttagatcatacccctgttgtcaacggttattatggtcaagagcaagtctgacatggcactcgacttcaaacaagggaaggaaaccgaagattgcacggggctgatagcaagacagacaagcaggtagaatagctttcattctctctaaacttataaaaaacattccattggggtgtaatgcatgagcctagctctttggcagctgccagtgtagttttgggtaagtttcttgctctctctaggcttcattgttctcaagtgtaaagtgaggtgattagacagcctagaaggacctaagctttggccttctgagactgaagtctgggaccttcccctggcacccagccccttgcttagccattctccattattcccaattgcccaaatgaaggcatgagaaattcttgccaaaattttgcttcagcccaaaggttttggttgcccttatcaccggcttttggagcagattcacttttagggatatcagcaatctctggaactaggtggaaggactctaagaggttatacattggcaggtgtgttggtaagaaaggtcagggcaacttcagtttggaactatttcagaagctttctgctggagtccttttccatgtgccagatgcaccttaaaaaatgagtttaggctggtggctcacacctttaatcctagtactttgggaggcccagaagggaggatcatttgaggccaggagtttgagatcaacctggccagcagagtgagaccctgtctctactaaaatataaacaacttagctgggtgtggtggtgagcacctacagtcctagttacttgggaggctgaggtgggaggattgcttgaacccaggagtttgaggctgcagcaagctatgattgtgctactacactccagcctgggtgacagagtgagactctgtctaaaagaataaaaataaaaataaaaatgagcttaatgccagacctgtctgtatttcagtcctgcctctcctataacttctaggtgaccttgggcaagtcacttctctctggttcttggatgcccatccgaaaagcaataggattagaccctacaaactctaggcttctttctcaggataatcttttttatccatgagaattttcttggttctttagctagcatagactccccacagaaggtcccagaggaataagagtttatgaacagactagaactggagagttcgtggcagatgtgccaggttgtcagggggataaagggccgctccttggttctgatttcctcagcagcctgtgcttgatgccaagtggtgttgtccaacccagacctgattcctcccttgactgtcctccgaccttccaattctagctgcatggacattgcacacttggtctcaggagactccagtttcagtttcttagctggttctctgagtgaggtgatggggaatccctagcatttcttagtactgattgtgagcttcccctctgcatgttagcatgcagttcgtgacgattcactacaaatctgctctttatggagggagagtatagggggagcccagtatcactttccaaatcctacccatcctttgaggcccaggcaggccctacctataccacagtttgtcctctgaactctgagagcacttaacttcagggacacccaaattgacatttacatcaagggcatgtgaattattttctattttagaatagagtttgtacttcttgaaaataatattgtaccatgtagctctttttggtaatctttgcattgccttgaatagtgctgattttaaaactagattttaaaatataatttggcatagttcaataagtctgggtttcatgtgctgtcttctctatcccaggagattctgtctcatgttattgttaagagcatgtgtggcatgcctagcaagaaacctgaagccagctccttgagattgctccctctttcactctggagattcctaaaagtcaatgcaagaattctagaaaggagcccctgatggatgccaagggtgtcatttgaatgggcaccattgttgctggagaggatgtggagaaataggaacacttttacactgttggtgggactgtaaactagttcaaccattgtggaagacagtgtggcgattcctcaaggatctagaactagaaataccatttgacccagcaatcccattactgggtatatacccaaaggattataaatcatgctgctataaagacacataaacacatatgtttattgcggcactattcacaagagcaaagacttggaaccaacccaaatgtccatcaatgacagactggattaagaaaatgtggcacatatacaccatggaatactatgcagccataaaaaaagatgagttcatgtcctttgtagggacatggatgaagctggaaaccatcattctgagcaaactatcgcaaggacaggaaaccaaacaccgcatattctcacgcataggtgggaattgaacaatgagaacacttggacacagggtggggaatatcacacaccggggcctgtagtggggttgggggagggggagggatagcattaggagatatacgtaatgtaaatgatgagttaatgggtgcagcacagcaacatggcacgtatacatatgtaacaaacctgcatgttgtgcacatgtaccttagaacttaaagtataaaaaaaaaaaaaagaatgggcaccattgtgtccaaggtgtgctgtggatatagtttgtgtcataagtgaaggagagctctctgagttcatgttctccaattggagtgccatggacacttcaaagtatctgtccaaagaacatgttcataagagatgccaaaaagcactgtgcttgtttatatccggggcatctttgggccacttggtctttagtcttccaaagactgattgccttatggaagtagagactgttcaacatggaatacttaataagcaggtgcttaataaacatttgattgattgatgaagggactttaaacttttccaaagatgctaccgctccctttacccctgtctggagaatgcctttcttccttactttcaaatttcctttgttggacactgactgcagatcctggtatcggcagtagcttgagtatcatggcagagcagagaacatcttgctcctaaggaatggactctagggtacctgttttcacctgcagtgttgtcatttattcattcaacaaatatttagtgaacactatgtgccaggcgtggtgctggactctacaaatacaaagatgaacacacatggtccctggccttgccaagtttacataaagcactgtgggtgtattactgtgctccggatgctgtaccaaaataccacaggctgaatggcttaaggtccagcagggttggcttctggtgagggccctcttcctggtttgcagatggccaccttctccttcttgctatgccctcacatagcctttccttggtgcatgtgtgaggggagagggagggtgttctctggggtctcttcttataagaacacatcttattggatcagaaccccacctttatgccctcatttaacactaattatatccttagaggtcctatctccaactgcagccatattgggggttagggctttaacatatgcatttaggggggacataaacattcagttcataaaaatgaggcacatgaacaaatgaaaaagcaattacctgtaagcagtaaaagcataaaaacaagcaggaggtagtatacactaaatttaggatggggagggaaggggatgcaaagagagagaggtatgcaggggcttaaactggtatttgctatatctactggtaatgatttgtcttcattcaagacctacaaaagtcttcattgtattattctttacacctttaagtattaattatttcacaatatttaaaaaataatagaagacactattattgtgcaatgtagtaagaggtaactaggggggcatgctcaacatgctgtaggagcacatagaaggggaatcaggaagggtataaaaaagatggcatctacagaggagtagaaggggcccaggtgcagggggaaggcagtggtgagtggtcagtagaaggaccaaggccaggctgggagtggtggtccatgcctgtaatcccagcattctgggaggccaaggtgggaggactgcttgagcccaggagtttgagtgtagtctgggcaacatggtgaaacctcatctctccaaaaaaatccaaaaattagccgggtgtggtggcgtaggcctgtagtgccctctacttggaaggctgagaggcaggaggattgcttgagcctgggaagtcaagactgcagtgagctgtgatcaagccactgcactccagcctgggcaacagagcaaggccctgtctcaaaaaaaaaaaaaaaaaaaaaaaaattaccaaggccagaagtcttgccgggctgacctcagcaagcttactttctctgagttgcttaatttgggaattcagaagacagggtgagctatactgtttaacttggcttttggggtgatgtggcctgtggggccaatgtctggccttttttgcctgctcagtggtgtggctgtgtttggcacgtgaattatgtttgactttggccatgtctttgaaggcaatctctctttgctgctgtggcatctagaacaggtggtgtttacagcgtttcccagaattgcctgcttcctaggactttacctatccatttgtccctctattcattcatccagcatccattcactgagcacctactctgccaggtattaggccaggtgctagggcttgaaggcccatcaacctagtcctgggccttgaggagcttgacaagcaatggaaaatagcatgggcatccacatctccaagcacatccttatacctcatctcatttagccctcgggctgccctgtgtggcaggtttccattctatgattgaggaagctgagacttgaaaggaaagtgacttgatatttgactctaagctaaggggcttttcccactatgccaggctgcctttactgatgttgggcatggtcggaagagctcagaccacggctgccccctctcttcctgggaaagacaccctcagacaggtctttacatcccatcctgttttacgaaggtttctgagaatgagcagggagaaggacctacaagtaacctttatagtcattcagtccaaccacctcactgatgacttggttacccagaggataaagaaaagcttagcttaccagaaactccagcccctgttattatgaaaaagaacaggacaagtcttgagacccctagaggaggcctctgatctggagagaatcgacagaggagccagacccagagtcccctggagggagccaggtctgcagaagctcagaaactcagtcctgcctttcttgcatatggagtccatggtcatagtagcagtgtcctggctctacccagagtgtccaatggcttcctgtccctctggacttgtcatttagtgggcaaagtccaagatcacacctctcactcctgcccccacctcttgcccctgttttatctcacttgggaataatctgttcccatgtgaagccaacgaaaatgagcctccaccagtgtggggtaacccaacaggcagatttggtatggacacagggccccagccagatgaagacatcccaaagttgagaagagttcagtaatcagaaaatctaaaaagatgctcttttaatttcagcacacatgtacattttgtgttgtctggtgagtattaggaattatatttggagagagactgcaatctttatagggttcagggccttttaaggtcttactcggaccttggacaaccaagagggaaagggccaacaggtgtgaggaaaataagttgtgaggctgcagggaggaagaggatggctcaccaggatgaagaaaagggaaggagaggagctctcagtggtgcaattggttagcgtgtggcacttacatgaaaagggaaggagggcttggcacaggctagcgggaagcctcaggtcaccctgacacctgttgccatggcccggcggcggtttcctgacttgtcaggacgtgtgcacagagagaacaatgggtttgccttgacaggaagatgcttcctgttttgctgcatgggttcattgttgggcattaagagggaggggtctatgtgtctgtgtttttcgtgttgccaaaagctctctgaggggagaagtgggggtgagtgaggacgggggtctgaggaaaggtgaaagggaaaggaagggagcagttattcttccagaattgctcagccaaacctcacgccattctagtttcagccaaccagagagggtggggctggccctgctgtcctactgtccccaagagctctaagcccagagcttttgtgcatgactgagggctgcccagaatccctccttttgttccccagtgagacccggtggtgacctttatcttggcaaggtggcaagggcgacaggaaacttggactgaaataacctctgtggtgaaagcaggggtgggaaatgttgaggctggtctcatggcgagtgataaattagacatccaagatgcccactccccacctccagcctgcccattgctgggccaaccctgcacattcacaaccgaaattgtacatttttaaaatttattttttattctttttaaaaaattttccatacgttattggggtacaggtgatatttggttacatgagtaagttatttagtggtgatttgtgagatcctggtgcacccatcacccgagcagtatacactgcaccatatttgttgtcttttatcccttgccccttcctgctcttctccccaagtccccgaagtccattgtatcattcttatgcctttgcgtcctcatagcttagctcccacatgtcagtgagaacatacaatgtttggttttccattcctgagttacttcacctagaataatagtctccaatctcatccaggtcattgcaaatgctgttaattcatctctttatggctgagactaatcagatggaatactattccattatacatatatatactacagtttctttatccactcgttgattgatgggcatttggattggttccatgattttgcaactgtgaattgtgctgctataaacatgtgtgtgcaagtatctttttcgaataatgacttcttttcctctgggtatacccagtagtgggattgctggatcaaatggtagttctacttttagttctttaaggaatctccacactgttttccttagtggcgtactagtttacattcctaccagcagtatagaagtgttccctgatcactgcatctctgtcaacatctactgttttttgattctttgattatggccattcttgcaggagtaaggtggtatcgcattgtggttttgatttgaatttccctgatcattagtgatgttgagcattttttcatgtttgttggccatttgtatatcttcttttgagaattgtctattcatgtccttagcccactttttgatgggattgtttgtttttttcttactgatttgagtttgttgtagattctggatattagtcctttgtcagatgtatagattgtgaagattttctcccactctgtgggttacctgtttactctgctgactgttccttttgccatgcaaaagctctttagtttaattaggtcccagctatttatctttgtttttattgcaattgcttttggggttttggtcatgaaatccttgcctaagccaatgtctaaaatagtttttccaatgttatcttctaggacttttacagtttcaggtcttaggtttaagtccttaatccatcttgagttgatttttgtataaggtgagagatgaggatccaatttcattctcctacatgtggctagccaattatcccagcaccatttgttgaaaagggtgtcctttccccactttatgtttttgtttgctttgttgaagaccagttggctgtaagtatttgggtttatttctgggttctctattctgttccattggtctatgtgcctatttttataccagtaccatgctgttttggtgactatggccttataatatagtttgaaatcaggtagtgtgatgcctccagatttgttctttttgcttagccttgctttggctatgtgggctcttttttggttccatatgaattttagaattgttttttctaactctgtgaagaatggtggcagtattttgatggggattacattgaatttgtagattgcttttggcagtgtggtcattttcacaatattgagtctacctatccatgagcatggcatgtgtttccatttgtttgtgttgtctgatttctttcagtagtgttttgtagttttcctcgtagaggtcttttgactcctttgttaggttattcctaagtattttatttttcttggagctattgtaaagctatttatttttcttggagctattcttgagttcttgatttgatctctgcttggtcattgttggtgtatagaagagctactaatttgtgtatattaatcttataattggaaactttgctgaattcttttatcagttctggaggagtccttagggttttcaaggtaaactatcatatcatcagcaaacagggacagtttgacttcctctttgctgatttggatgccctttatttctttctcttgtctgattgctttggctaggacttccagtactatgttgaagaggagtggtgacagtgggcgtccttatcttgttcctgttctcagagggaatgctttcaacttttccccattcagcattatgttggctgtgtgtttgtcatagatggtttttattacattaaggtatgtcccttgtgtgctgattttgctgagggttttaatcataaagcgatgctggattttgtcaaatgctttttctacatctattgagatgatcatgtgatttttgttttaaattctgtttatgtggtgtaccacatttattgacttgcatatgttaaaccatccctgcatcccttgtatgaaacccacttgatcatggtggattatctttttgataggttgttggattcggttagctaatattttgttaaggattttagcatctgtgttcatcaagaatattggtcttagttttcttttgtggttgtgtcctctactggttttggtattagggtgaggctggcttcatagaatgaattagagagggttccttctttctctatcttgtggaatagtgtcaagaggattggtaccaattcctctttgaatgtctggtagaattctgctgtgaatccatctggtcctggactattttttgttggtaatttttatttatttatttatttttgagacagagtctccctatgttgcccaggctggagtgcagtggcatgatctcagctcactgcaagctctgcctcctgggttcacgccattctcctgcctcagcctctccgagtagctgggactacaggtgcctgccaccacgcccagctaattttttgtatttttagtagagacagggtttcactgtggtctcgatctcctgacttcatgatctgcccgccttggcctccgaaagtgctgggattacaggcatgagccatcacgcctggcctttgtcagtaatttttaaagtaacatttcaatcttgctgcttgttattggtctgttcagggtgtctaattcttcctgatttaagctaggaaggttgtatttttccaggaatttatccatctcttctagattttctagtttctgtgcataaaggcatttacagtagccttgaatgatcttttgtatttcagggtgtcagttgtaatatctcctgttttgtttctcagtgaggttatttggattttctctcttcttttcttggttaatcttgccatggtctatcaattttatttatcttttcaaagaactaggttcttgtttcatttatttttgtattcttttgtttcaatttcatttagttctggtctgatcttggttttttcctttcttctgctgggttggggtttggtttgttcttgtttctctagttccttgaggcatgaccttagattgtctgtttgtgctctttcagactttttgatgtaggcgtttggggccatgaactttcctcttagcaccgccttagccatatcccagaggttttgataggttgtatcattattgtcactcagttcgaggaatttttaaatttccatcttgatttcatttttcatgcaatgcttattcaggagcaggttatttaatttccatgtatttgcatagttttgaaggttccttttggagttgacttccggttttattgcattatggtctgagacagtgcttgatacaatttaaattttcttaaatttattgaggctcattttatgacctatcttatggtctatcttggagaaagttccatgagctattgaatagaatgtgtgttctgtggttgttggatgaagcattctgtatatatctgttaagtccatttgttctaggatatagtttaaatccattgtttctttgttgactttctgtcttgatgacttgtctagtgctgtcagtggagtattaaagtcccccactattattgtgttgctgtctatctcatttcttagactattagtaattgttttataaatttgggagctccagtgttaggtgcatatatgtttagaatgtgatattttcctgttggacaaggacttttaccattatataatatccctttttgtctcttttaactgctgttgctttaaagtttgttttgtctgatataagaatagctacccctgaacacttttggtgtccatttgtggtcaccagtggtgagaaataccttttcccaccactttaagtttatgtgagtccttatgtgttggtgagtctcctgagggcagcagatagttggttggtgagttcttatccattctatggttctgtatcttttaagtggagcacttagggtatttgcattcaatgttagtattgaaatgtgaggtaccattgcattcctcatgctctttgttgcttgcgtactttgttttctgtttatttttgctttttaacttgtatttttgttttatatgtcctgtgtgatttgtgctttaaagagattctgttttgatgtgtttccaggatttgtttcaagatgtagagcttcttttagcagttcttgtagtggtggcttggtaatgatgaattctcttagcatgtgtttgtctgacaacaactgtatctttccttcatatatgatgctgggttttgctggatacaaaattcttggctgataattgttttgtttgaggaggctgaagatagagtcccagtcccttctagcttgtaggatttctgctgagaaatctgctgttaatctgataggtttgttttgttttgttttttaataggttacctagtgcttctgtctcatagctcttaagattctttcctttgtcttcactttggataacctgatgacaatgtgcctaggtgaagatctttttgtgatgaatttcccaggtgttctttgtgcttcatgtatttgtatgtctaggtctctagaaggccaggaaacttttccttgattattcccccaaaacatgttttccaagcttttagaattgccttcttccgcaggaacaccgattattcttaggtttggtcatttaacataatcccaaacttcttggagtctttattcatattttcttattctttttttttgtctttgttggattgggttaatttgaagaactcgtcttcgagctctgaatttctttcttcaacttgttcaattctatcgctgagactttccagagcttttgcatttctaaaagtatgtccaaagtttcctgaatttttgcttgttttttctttaaggtgtctatttcctctaatatttctcccttcacttcttgtatcattatttggatttccttgcattggacttcgcctttctctggtcccttcctgattagcttaatgactaacctcctgaattctttttcaggcaaatcagggatttcttcttggcttggacccattgctggtggactagtgtgatttttggggggtgtcgatgaaccttgttttgtcgcattactggggttggttgtctggttccttctcatttgggtagcctctatcagagggaaggtctagggctgttgaaggctgttgttcagatttttttgtcccacagggtgttcccttgatgtagtactttcccccttttcctgtggatgtggcttcctgtaagccaaactgcagtgattgtctctcttccgggtctagccactcagcaagtctacctggctctgggctggtactggggatttctgcacagagtcctgtgatgtgaactgtctctgggtctctcagccgtggataccagtacctgttctggtggaggtggcaggctgtgcaatggactccatgagggttcttagctttggtggtttaatgctctatttttgtgctggttggcctcctgctaggaggtggcactttccagaaagcatcaactgtagtagtgtggagagggactggcggtaggcggggccctataacttccaagattatatgtcttttgtcttccattaactaccagggtggacagggaagaaccattgggtgggggagaggctaggcatgtctgagctcagactctccttgggtgggtcttgctgtggctgctgtaggggatgagggtgacattcccaggtcactagagttatgtacctaggaggattatggctgcctctgctgagtcatgcaggttgtcagggaagtgggggaaagccagcagtcacaggcctcacccaggtcccatgcaaacccaagtgctcactcccaccgtgcctccccctacagcaccgagtctgtttccaggtgaagggcgagatgggcttgaaaacttgcctgaggctttttacctcccagagtatttgggttgtctcctgggtcttgcaggagcagtccgcttccttcagagggtttgtgggtcctctcagggtggctggtttgttcttgcagttgatctggagctaaaattcacaatgcaaacctccacatggctgctctgtccagagctgcaatctagtcctgcctcccatccgccatgattcccacttggattgaaattgtccattttaaacatgattagaaagcccaggtatcttgatgctcattgatcctgagaccatctgttgcagtgaaaacgtgtgtggggttccagtcttggctctgccagccaaatttccatgaggcccttttctcctggttccttatctggggattgaaccagatgatcttgtctgtcctctctggtctcacatttggggattccattgatcatctcctagtgggactgtggcctcagagaagcttaggttatgcacatttaggaaatcccagtagagctttggtcagaaagaaaagatgggtgaaaggtggagtcctgaaaccctcctgttcctccccatacaactgtttaaggagaccatatctatttcatcctcctcttgtgcttttaatggcattcaaagcccttctctatctggcccagttgacatcactgacctcaatctctctactcccccactgtagctactttgtgctccagccattccgagtgacctgtgggttccctaaaagcattgtgcactttcatttttctgggattttccacatgctcttctgtcaggctaaggtggctccagctccttctctcccgtgtcacactctaactcattattcaagacccagctcaaatactctcacctcctgaagaattcttgaagtccctgaacccacaaatgctgttcacactgctaggatagcacctcttagtcaaatttgtatcatgggcatgcatgcatttttctccctctatcagcttaccattacgtggcatcttatttatttcttacatatttaacacagtacctggcatattcttggtgctcagccaaagagtgctaagttaaaatgaaggatatttctgttgatttgaccccaaacaggctacactcagagtgcataaaatagtggccactctttgagttgagttggatctgataattaattggtttagatccagttagaggccttttatgtctgcctgggttagacagaaactgatagtaaatggaaatattgcaaggggtgtaaatttcagcttttggaaatttgcaaggatttttatattctaccttctttatttctttttcccttgtgtgcttaggtagggaaaaatcattggctaggttgatcaaggggatcctcaaatttcagtatcagtcttagctttcatgtaatgctcatgaggtccttgctgtggggaagttctcaggctgcgcaaggcaccacagcccaggattcagggagctcccagagtgataggcaggccaccaatgtcaacgctcttacatactgtttgaggattaactggagctaatacttattcagcacctactgtataccagaccctgaatcacctcatttaatctcacaacaaccctgcaagttaagcagctgtgatgtccattctacagataagaaaatggagactcagagaagttaagaacttccccaaaggacgctcatagctagttgcagcaaaccaggaatggaactcccccatccatcctctttcccccataccacactagttgataagcaggaatgcaacttcacaaccactgaaagccctgttaaattaagcttagcctaaatctgccttcttacatattctaagtccagcctaaaggtttctccatacatagtgaactacaacttaactggatgtgtgaacagactgtaacctactcctgtgcaagtcactgagttttggccaaccaaggttgccaactgtacagactatgttcaaataaggcaatgctaagataaacaatcctgctgtttctatgcctcacttccattttctgtaggtcactttccattttctgtccataaaccttcttctaccccatggccatgctagagtctctctgagcctactctggctcaagaggcttcctgatttgcaaaccgttcattgctcaaactgttaaatttaatttgtctaaggtttttctttcttcttcttcttttttttttagatggagtttcactcttgttgcccaggctggagtgcaatggcacgacctcagctcactgcagcctccgcctcccgggttcaagtgattctcctgcctcagcatcccaagtagctgggattacaggcatatgccaccatgcctggctaatttttgtatttttagtagagatgggctttcaccatgttggccaggctggtctcgaactcctgacctcaggtgatccacccgcctcggccccccaaagtgttgggattacactttgagccactgcgcccggccagtttctcttttaacagatgctgtcagaagtaggatccaaggccgggcgcggtggctcatgcctgtaatcccagcactttgggaggccgaagtgggtggatcacttgaggtcaggagttcgagaccagcttggccgacatagtgaaatcccgtctctactaaaaacacaaaaattagccaggcatggtggcatatgcctgtaatcccagctacttgggaggttgaggcaggataatcacttgaacctgagaggcggaggttgcagtgagctgagatcacgccattgcactccagcctgggtgggtaacaagagtgaaaccccgtctcaaaaaaaaaaaaaaaagattgagtctcctctcttatcaaagagtaaaggtttttgcttttaaaaatctcttatcactttggctaaatgaatgatttttttttatggtgacctgtgatcctattttggtcaattgtctgaatcttttgacatacttgacaggcttcctgaaaatcaaatttcaacttcaaaattaagtggtttgtttttttttgttgtttacctgtacatttggaatgctacagagggctcctgcagcatccaaaagagagataagtaagattacgtgatatattaaattacaggaagcactgtcaaataagaaataatgtttaatcttcttcaagttgtatttttataaatattttattaatatatgttccaaaattgtatgggattcctaaaattctgatatgtctggatatatgctatcaattataactatggttatgttacataattttaggccacaaaaataaccaaatgtccttgtcaattgtatctttatgaccattttaaatcatttccacagttaattcctgcatttagatgcagtttctgaaaactcttcacaagcaagcaaaatcctagagtaatgtgtcttcaaagaggttcatacaatgatggaaaggactctgacaagcactcttgaatacaggtttaggatcctatcatttggactggctaagaattcccagaactctaataaaaggactgactgatttataaaactgctaacccaagtagggcaagaattaattgacaaccaaaaaaatactttgacagattttcatgctaaaatcagctagcactaaaattatttagatatataatttaaatgaactccctggtccaagtcaaattacccatgaaaaccatctaataaacagtgctatgcacctaaattggagaaacaaaattggtatttaagatgtaagtccagtataagcatagactcatggagaacctggaaggcttcctggtccttcctgagtccttcaagttcccattattagaagctctgaatttcaagacttatcataaaacagataaaatgatccaaattaaaaatatatatatattggtgtggtgactgttatgaattgctaaaatagtttatgatcaatatttgatttgtcaaacccataattcttggaagacaataaaaacttcaggtacatttctgttatctgatgggccatttaaacacttatagggggatttggctgggctcagtggctcatgcttgtaatcccagcactttgggagcccaaggagggcgatcactcaaagtcaagatttcgagaccagcctggccaacatggtgaaacccagtctctactaaaaatacaaaaattagccaggcgtgtgatgtgtgcctgtaaacccagctactcaggaggctgaggcaggagaatcacttgaactgggaggcagaggctgcagtgagccgagatcataccactgcactccagcctgggtgacagagcaagactctgtctaaacaaaacaaaacaacacaacatttatagagggatttaattcaattgtcatttttgatacatgctttctggttctataaaagctttcccatacaagagggctaatattacaacaatagctaaaaggttattaggaaatgtgttttcctcgtgggacattcccagagaaatctccagtgatagagatacttgtttcactggacaagttgtaatatagttaaatacggtattacatatatgacagcattaggcaaagctaactgaactgacttgattgctttggtcaaaggtattagagattgatgacaatcagacccacttccagtggaaaacataagctgatcccttatgaaatagtcactgaaatgcctatgcactaaataatggaagctcatatatcttctgctactaaactctgatacgactaaatgctgcaagtctttagtgcgttgtgccatggtgtattttcaccggtaaagaaagcgtttcatggttcactgactaatcaaacccttcatgatctaaaacccagagactgggtcttctgagaacaacatcagaaaaagattgcccttgttacccacactgcagaaaactttgggaacttgaaccttgttcgtatctcataactcagaagggcacctccagactcttaattgtacagccactggagacctaaagatagagataaccaaggaagtttctccccagaaacagatggcatcccagatatgaacaactttttcccaagatcatggatcaagacttctctgctaccgtgagacttgtatctctcagtttttccttgcttttgccttgatatggtttggatctgtgtctccacccaaatctcatgtctaattataatcccaaatttggaggtggggcctggtgggaggtgattggatggtgggggtggtttcttaggttaacgtaagaaaccccttggtggtgtcattgcaaaagtgagttctcatgagatctggtttaaacaaaagtgtgtggcacctccccactctctctctcttgctcctgctctgatgatgtaagatgtggcctgctgcccctttgccttctgccatgattgtaaatttcctgaggcctccccagaagcccatcggaggccagcattatgctttctgtacagcttgcagaactgtgagccagttaaaccccttttctttataaattacccagtctcaggtatttctttatagcggtgcgagaatggactaatacaggcctctatgaaaaatagaactgaaaataaggtctcttttgtacactcatggagtatacttttattagtggaggatttcgaagcaaaccttttatatggacacccttacgtcttgacagatgaaggataaagggccaatgtggatgaaaaattttattggtatctttgttgcttcataatcactcagaaacagaacactggtccactcctcttaacctatgtcataggttaaaacattgccaagaggccttcactcttctagataggcatcatttattagatctttttttcttggtttagagtaaatgaggcaatgattaaaaatttatccctcataataggctagataacagattctactacagagactctggttacacaacagattttaaattctcttgctaaagttgcactaactaatagaattgctctggtttacttactggctaaacaaagtagtgtctgcagttgctgacacatctaattacacacggaggaatacatagggtattatagagactcagttgtaggggattaatggacaggctgcttggttgaaatgagtaaactctttatcgagtttattgtttgatctatttgattttagttggtttggttcatgcggaacctggatacagagcatactccaaactcctggtgttatccttctgatagtcataattgtaatctccctggtgtgctgtattctctcaaaagttctaaatgtttgtacgtagccatctccagaatgtcagatggtctctcctagattggaatgacaataactcaaagaattgtgtggccataaggacaccgtaacctatgaactatgtgctgagactgaaaacccaaaatgatggtaagcgagagtggagctcatggcctaagttttggtcacactctcacctaagtgagaacctgaccagaagggggaaaattttaaacaaaattataggaggcaattgttttggactgagattgtgcattagaccccagcagaccagaccaaaccaaaacagagtcactcaaatgtgacatgatcgatctgaaactttaagaaaacagaccaaaagttttgcttttctcttaaaaacaggagactgcagtacaaagaggtccctgctactctaatccttaaaaaaaaaataacctgaagtccttgtttccacctcacaaacccactgttctgctatttcccaatgggatttaggaccaaataggtacctttatcatggtgacagagtgacatcagtgcctaaagttttggtctatctctcaaaattaagaggatgaccaaaaggggggaattatcaaattaagtttagcttaaagctgcttccttacatattctaagttctgtctaaaggtttctcctacactgtaaactgcaacctaactggatgtgtaaacagactgtaacctactattgtgccactcattgaatttcagccagtcaagggcagtcaactgttcaaagcgtgtttaaataaggcaaatgccaactataaccaatccagccgtttctgtacctcacttcctttttctgtctgtaaatctcccaccaagtggctgtgctagtgtctctctgagcctactgtggctcaggcgaatacctgactcacacattggtttttgctccactaaattctgttaaatttaatttgcctaaggtttttcttttaaaagccccaaagttaaatgcctctgttgtctgcacaccagcaaaatagaagcctcatgcagccctcgtgtcaatacagtactcatttgtgaattagcagttacctgagtgcttctgattggtggagggtaggtcacatgaatcaattcctacatgactgcttctgattggtggagagtaggtcacatgaatcggcacctacatgactgcttctgactgctggagggtaggtcacatgaatcaatgcctacatgagtgcttctgattggtggagggtaggtcacatgcctgtgtcctaactgcaggggataccgggagtttgagttcttgacttctatttcgggaggcaggacaataataaaggaatttcctccagaaagaaaagctgtccgtaagatgatgagccgccatcatgaatgtgacaggtgtccattacactgactcaccctgaatgtcacaccataggaagtgaagttagatgtccgaacacattccccttttaaaatcctgctcctttcttaaaatatggtttagagcaaagagtttttattacatagttttttgaggtataattttacacgcagtaaaaattacccattctagcgtacaggtctagaattttttaaaaaataaattcatacaattatgtactaccaccaacaacatacggtatataatagtttcatcacacaccactgttccctcacgtgtctttgtagccaaccccttcctctaccctcagctcctcacaaccactgaactggtttctgtctgtagtttttggaacaaagactttctaagcaaagaacaaaaatggagcagaagagagtctgtgtgtaaataccaatgtatgcatgttggaatctccccctccttggctcctgtcctgggggtgaagaaagataaagattattgaaaacaaattgaaatgatcaaaagtataatttcttttcaatgtcagatttagggcttaactcaggaagatggatgagctcactattgtggctccggctcactgcatgaattcctgtttagagtgataggtaaatagcacctgaacaaatgcagcctgccctcagattcaggtggaggaacccacaccttagaggtctttctctggccttcctcagacggtacccttgtcaggtgaaggactggtccatgtccccccttctatgtcacactccaggtctcaggacccagtattcccggcccaaagagtcctcagccactttcaggcttgcatgggcctcttcccagggaaaatcctccacagggtagactgcacagcttggtatgcacccctagactctgttgatgaccacgtcctggctgtttatggtggctgtagatgacgcttaggtatccaggctggggagtagagaaggggagctgaggggagagtctgagagttctcgaaggagtctgagaattctaaatttaaacatgaccctttaggtcgttatgaaaatgtatagtttcattatgaaatggaacctattttataagtctgttagctctatttataatgtaactatctgggcaggtagtgcgtaggcctctgtttgtactcttgcctgggccctgcaaatatttgagacaggccgaaatgaatctaactgtgcttcctcagagagttaccaaagctctctgcaggccaggctccctggtggcagccctgaacccctttcctgaggatgtgggagaggaaaagagggagacatttcttggatgtctgctatgtgctggaatctgacctgggctgtttccctcacatcatctcatttgggtctcccagctacttgccagataggtatgtcattgccaatgtatagatgaagaaatggaggcctagcagcatttaagagccttaagtgcccaagctgggattccagcgcagatctgcgtggcttcaagtctggccgtcttccatgctgccattagagttctgtccaccttggctctcctccccgacaggattcccagagggcccgaagtcagttacttaaatgggttgaaatcagacatgtactatgctttggggagaaacgaaaccaaaccataaatttcccgaaccttctctggttggccctgtttttgttccaaagcagaaaagggcaaagtacaggagggggctggggcagagagagtgcaaacacatgggtacagaaggcacgtgataattcgctgtggaagcaagagagcgggtgggtgcggacgtgggtgggagtgagggctgagaccaagaagtttggcttttgagtcagtcctggttttaaatctaggtcccaccacttacaaattgttcaacttagaccaagttgcttaactacatagaatctcggtttcactatcttcaaaagataattgataatagggtttcttctaagagtctttgtaaggaggaaacgaaatcgcatcagtaaggccccagcccgcagcaggttctcgacaacattcattcccttccaccctctccttcctcctattgacagagttgcttcagcccattttggcattctgtagatttctacagctgagaaatccaaaaataaacttgaattatggtgggtttagcaccgaggcacttctgtgtaaatagcagaagtgaaaagaaaaaaaaggccatctcatttctagtatttgaaaccaagcaccctcatcgtgtgggcgactcatagtagagggggcagggggagcgaggtttggcattttttctctgctgtttttgtttttgttctgtgatgatgtgggggactctccagggacatcatgcgtcacagagcaggggagaaaggggaggtgaagacagagcaagtagggaaatttgatccggtctctgacgttgtagggcagaattggggaaagagggagtgtcggtcaatgggtggaaaaggtcccgtggctgtcatgcccttcttacctcctgccccgagacacagttgggcaagtcccttaattcatttttcagtgagtttcccaagaaaggccgtcttccggaacatgtgttattcctgaaatacatggcagactcggttgaaagggtgtgtgtttgtgggtcacagagactcacaaaaagagaaggcaaggggctggcccgcttgacgtgagcccacatggatgggagtcacaggtgattattattattattaacaaaaggcttcccttacctccccaaacctaacttttcactattcataccatccatgtcttataggcccagggagatgaaaaagtgagtttacccaagggaattcacaagggcctaagtagaagagccaggatttgaactggctgcccctttctctctatggggctggcattggccatcctaataatgggggaaaagttgggttaacgaccagcggcctggggaattcaggtcaccttgatgtttgccctatggtcttgagttttgcaacttaaaaaaacaaaaaacaaaaaactatacacacacacacacacacacacacattatctatctacctctatttttttaagacaaggtcttgctttgtcacctaggctggagtgcagtggcacgagcacagctcactgcagccctgacttcccatgttcaattgatcctcccacctcagcctcccaagtagctgggactaccagcacatgccaccacacctggctaatttttttattttttgtagaggcagggtttcattatattgcccaggctggtaaatggacatattgacattacaagtcgatgttgtttttatagaaggagcaaataatgcaaaagggaccaactcatcagtgaaaacatatcataccatgcttggtgtttgccttggctagaagtctctggaggtgaatttatggagaatgcattcaagctgcctcccattcccactatatagataacgagaggaaggggtttaagctgcaataggaggctgttggagagactcaaggagaagcttcctgaccgtagacggttgataaatataggagccactggagggtggaagcaataactttccaatcccccgagccttccagcattttttggtgtttgccaaatatcatcacctcctacctctcaccagcgcctggactcaacctttctagagccagctcaaatgccaccccttcagacttcccagcattgctgtgaggaatcgtgggcttttctttcctgctcccagtgtgactttggtacctttatttagcatctatattgtcctcccttgacttaaagccaagttgttaattctcccctttcttgagttcttagagggcagggatgcattccattcatctttatcaccaacacctaaggtgacacctggcacatagtcagtgctcgttaaaggtgtgctgaactttgaaacgaagggttgcctgttggtggttgaaaacatttttttttcgaaccttgttaagtttgaaaagttcaatccccagtgccaacatgcatataaatataggtgctttcatgctctgttgatgggaatgtgaactggttcaacttttctggagagtcatttggtaaacatttaggagaagtcttagaattttctatgccttttgactgaattcttttttttttcttttctcctaaggagttagtgaatggcttttcataaagacattgtattttttcatagcaatgtttttaaaaattatagcaaaaatggggccaatattaatatgaatttggataaatagtggtttatatgcaatagaatgtcatgtagccattacaattgatgatatatttgttaatcaaataagtaaagtgacaaaaacattacaaaataggaagcatagtaggatttcaattttgaaggaaaataaggctctatccatggaaaaatgccttgaaggatatacgtctaagtgtttcaaccctttttctctaggtggtgggattttaggggattttgactttcttctgttcatttctctgagttttctcaattttctcccatgtgttacaacgaacatgcattacatttagaacatagaaaaacattttccagcatcttgagttgattctctaagtaaattccttgctccttaaattctgaaaactgtagagaccagatcaacgtgtaggatgtcagaggtggaaaagctgtgggaagtcctttgggccagagttttgcaaaactggctgtgcgtgagaatcacacgtggggctttcagaactctggctctgcccatacccagtggcaataaatcaaagtcaccagggatggctgcaggcgtcagagtggtttaaagctcccaggtgattctaatatgcagcctagtttgagaaccctgcttttgagttgtgctgtctaacagtagccactagccacacgtggctatttaaattatgcaacactaaataaaaaattcagttccttagtcaaagtagccacttttttctttcttttttttcttttttttttcttgagacagagtgtcactctgtcactcaggctggagtgcaatggtgcgatcttggctcactgcaacctctgtctcccgggttcaaacaattctcctgcctcagcctcccaagtagctgggactacaggcacccgccaccatgctcgcaaagtagccacattttaagcactcagtagtcacatgtgtggttagtggcactatattgggcagtgcaagttaagatctacctctcacatttcaggagagggctgggcatggtggctcatgcctgcagtcccatcactttgggaggctgaggcaggagggttgcttgagcacaggcatttgagaccagcctgagcaacatggtgagacccctatctctacaaaaaaaaaaaaaaattagtcaggcatggtggcacgcacctgtagtcccagctacttggtaggctagggtgagaggatcgcttgagctggggaggtcagggccgtagtgaaccatgatcatgccgcttgcgcttcagcctgggcaaccaagtgagattctgtttcaaaaaaatttttttctttttttttcaggaaaggcttttgcaggtgggtgccctccttctagcaggcctgaggctcagggaaggggcaggcctctgttcttgcctgttttagggcggtggaaaagacctcactcggccgtcaggagagtaatcttgtgcctagaaagttctttctgctttctcgtgtctaccccatcctcctccctgagcatggtgaagctcagtgcagcatgtttattttcaaaggcttgacaggcccaggcccttcctatctgttcagcctggtccaggccaccaggcaagctgtttacaagggatccaagtgctcggtggagagcagaacaggccgagagtgttttccacggctgccgagaaagatgagcgagtggaggcagaataacaaaaagccacttcaaaaacacaccagaaaaagtcacaaagcagagacaatcagaggtttgagacacacacacccccaaaaccctgacaagagagcgaaaacaagtcatgagggagcctctgatggtttcaagacagtcgcggttgctgattgagaacaggcctgtcccagcagttctcagaggagtcgggagctgcggctgtggggggtcagaaacttcacctgagttctgagaattgtggtgggacagtccctgagggctccgtctctctgggaagatggtggggggcgggtgagaatggcaggcccatgctggctgggtgagagtgtgaggctgttccagcctagagactggccaccggtcaggaagcagagtcccacctggccccaggcttctggcacctactgcctgagagcgtgaggcctctatggccatagtccacctgggaattcaaaggcgtaaggccacctgcatctaggaagctccttctttgggatctgagctgaggacccaacagtgaagaagccaagccagaagggaaacgctggtgctccgctccaccttgccccattttgcagtgaagtccagtgaagagagccctgggggtggagcactggagctcaggtcccaggcactatcactcccttgctgtgtgaccttgggcaggtcagtttacccctttggactttagtttcttgacctgcaaattggagggttggtctagatgaatggctttcaaccctggctgaatattggaatcacctggtgagctacaaaaatcaacatgatgccagttgttctgggatacaccctgggcatcagcatttttaaaagctcttcagatgatcccaggccaggtgtggtggctcacgcctgtaatcccagcattttgggaggctgaggcgggcggatcatctgaggtcagttcgagaccagcctggccaacatggtgaaaccctgtctctactaaaaatactaaaattagccgggtttggtggcatatgcctgtgcacgagaatcacttgaacccaggaagcagaggttgcagtgagcggagaccgtgccactgcactccagcctgggtgacagagtgagaccccgtctcaaaaaacaaaacaaaacaaaaaaagaaccattagtctgcctaatgcttatcaaaatttagagtgcacaggagtcttgtaaaaattcgagtggaattcagaaagtctagcatagagtctgagattccacatttccaacaagctcccaggcgatgtccatggaccacaccttgagtagcagcaagtctgtgttgaatgtccccttcccttgaacttgcaagttggatccaagctccaatctactcagtctgctactgttcttgttttggtagctggctgtagttgcctatttctgccaatctgccaataacatcattgtttctaagttctttctttccccccaccctctctcacaagaattgtttaaatcctcactcatcatttgaattctaatgagatgctgtggattgaatcaaatagggatcttcccttcaagggcagtaaataagagacagagccaggctgtgatgtgagttcaaaatggggcagaggtcatttttagctgagaggattggaagggatctacgtggctgataataacagtgtaccactgtccaagtgctttgtactagttgtctcattttatcctcaaaacaaccctacaggtaagcactgggaacgttccccagtttacacacgaggaagctaaagcttaaagagaagcagaggttttttgaagggggcatagcaagcaaggtgcagcgctgtagcttgaactcaggtgcctgtgctgacttttagtccacttagggcatgggtggtatttaagctgcatgcctgactagacccaaccagacccgatcagactcagccttttagcaccaagtcgtttgggctaggatgcggtttgtatgagtttagtctacccctcactcaccttccataccccgacagccagaaaaagacaggtggtaacagtttccacctctggtttctgggcccagacctccaggcctgtacacagagcctggggcctggactcacacttttccccagttggctgcctgtcccagcatgggtctctgctgcctacatctttgtctgtttgtatcattttatttccttggcggggagcaggctgtgtgtccaggcttttgtaggcttgtcccttcttaggcacataaccccaaatagtgcttcatagaaggttgcccgaaactaccatgatgactgcagatcctaaactcctcagattctgctgggttcttagctaaaatggtatccaacagcccagccccatggtttttccaagttgacgaaacccagcttgtctcaccttttgatatcagggttacagggttggggtggaggtgaagggtgagaaggatcggagacctctgtgttcccccactagaacttgagttcctagagacacgaactttgtcttctcatttttgaactcccagtgaagaatacagtgctgggcagagagatgtgtcaccgccttgtcagacgagtgcatgacagagacttgggtgcattttctttgtgcgtggggtgaatggcagtgttggtagtgtgtttggcttggctctcacacaggagattcacctgctataggtttcagcttgtaggccccggaaccctgtgggtgcagctactgggaaatctgtctttcaccacatctttttgggttctgtagctgctcaggaagatgaggttttcttatatagccccagcccctggagatgctgggtgagttgtagaatgccaacttcgagagcattaagagagaccctgtaatgattaggcagccctgggattgtagaatggggaacccatggaaggaggagacccccccactttcttacctttcagagaagggaatcatcttattgtagcagaagtttcttaaaattttgcttggacatctaaccttgaaaactgaggttaagaaagtgaagggcttagtccatagaaggaattttcctctgcatgtagtttttctcctatcactacaaaaaaatatgaagaaaagaaaccaaattcgtaccaaggtgctaaatgtgccctagaatgtaaagcaactttgcattggtcaaccggacccagtcagggaaatatttccatttattcaacttgtgtacctaagagaggttttttttttcttttttgagacagggtctctctctgctggccaggctggagtacagtgtcacagtcatgggtcactgcagcctcaatttcccaggctcaagtgatcttcccatctcagcctccctagtagcagggactacaggtgtgcaccagcacacctggctaatttttgtgtttgtagtagagatggggtttcaccacattgcctaggctggtctcaaactcctgggcccaagcaatccatctgcctcggcctctgaaagtgctagtgttacagaaaaggggtcctgatccagaccccaaaagaggattcttggatctcacgcaagaaaaaattcagggcgagtccgcagtgcaaagcaaaagcaagtttattaagaaagtacagtggcgaaaggacagctactgcatagacagagtaggatgttcccaaaagttagaggaggaacgcatccaccctaggtacaatgcttgtctatatgaggaggtgtactctgctataagggtttgtgataaaggattaattttcttaattactatattttgcaagagtcgatattattatctttaaagtaaaactaggaatgcctttgttctccagatatcaggacatctggacactcccaagtctgggtctgttttagtaaacattattagtttgttcccttaatcgtaaacatctagaggctaggaatgcctaactttctgggaatgcagcccagcaagtctcagccttattttcctagccctcactcaaaatggagttgctctgatttgaacacctctgacactaagattttaggcgtgagccactgtttcccgccttaagtgagaaaatcttgttgagccaattctttaagactccctcttgtctctttgagtcttacaagaaataagccaatgagaggttttccccggcctcttaggaaccttttctaggaggagagtgttcaagaagaggagccaaagctaggagaggcccacagagcgctggcactgaattcagaggggtggtgctctcctggagcccgtgtggctaatccatttacaccatctcctccgagaacttcatccagcccaggagggtgtgctgtggccttgctgggtcttttaccctggggccaaggatggcttggggtgtaagctggcgatcagtgctatttccacccccttcttcaagacataggctgctttaaaaaattttaattgtcagggttagaggttttgatggtgtggaactgggaggtgggcctgggagaatggaaattggatgtaaatgattgaagctggcccacagaagtcattctgcagtacatattcagtgactccatttccaggtagggaagttgaagccacaagatgggctgtgatttgcctaaagtctcctagcaaatagtggcagaattgggaccagagcttttccctcgaagccctggatagaacattaaagtaatggcagtgtaattgattcatgtctgcttaggtcttgaatcaatcattatgcacccacctgccctccctaggagatggctcctgagaggcagagaccttctcttaatcctctctgtgtccctgcacctcccagtgcagtggccagtacatgctggggggtcctgtggggtgtggggagttggattgggtggttaaacctgattggcgagactctttgctgcaaagagcactcggagcggggggttgggggagggcaggctggccccaccgcatcctctctactcagctgtgtcaactctcaccttgttgtcagaagtctttccagaccaactcagcctctgagttttggagcaatatctgtttatgccccacatttagccccctctataaacttatttatgtgggaagaggacggcatgcattgtgattcagtgtgggctgtggatctatcagcctgagtttcagtctcagctctatcctttctgagctgtgtgatccaggcaacccctctgagcctcaatttccttatctgtgaaatattccttttccacgggctggtcatgaggatgaatggggacaaggcatgcagccattcggtgtggcaccaggacctcagcacattcccgcccttatcgttgtgaagttttcatcattaaatgtgttgttctgcacctactctgaggatggttacctcacccatgagcaggaggaaatgatatgtaacgttggcagattgttatggcaaccaaatgagagaatatacatgagaatgctttgtaaactcctaaggcttgggtgtgaagtatgactgaccccaaaaatcacacaattggtaagaggtggcattttcctgcaatgaccacaccctcccccaaaacacatacacacatgtacacactcacatatgcacacacatatacacatatatacatacatatatatacttgcacaggcacacacaccaccaccagcatcagcaccacgaaacatctccatagtctgaccccgcccaccccccaccccaacccctggcatcccagggaagttgtcctctcattttttcaacagcctctaatgagccctcccagacatccagacaagcagtggtggaattaaaaaagacaaatgagacccagacctcactcttaggaagcttagcaggggagaagggtgagcaaaggttactctaaacaaggccaaatgacacaaaagccatagccacaaaagcctgggtggaggggaagtttgggaatgggcggtttcgtggcaggcctggcattggagctggtctttgaaagatgggtggtatcttagtttcctagggttgctgtaaacaataccacagactcagtggcttaaacaacagacatttattttcttatagttctagaggccagaagtccaagatcaaggggtttccagcattgtttcttctggtttcttctgaggacactctctgtggcttgcagatggccaccttcttgctatgtcctcatgtggtggtctgtgttgtctgggtcctgatctcctcttccttttttttttttttccccaagatcgagtcttgttctatcatccaggctggagtgcaatggcgagatcttggctcactgcaacctctgcctcctgggttcaagcgattctcctgcctcagcctccctagtagctgggatttcaggcatgtgccaccacgccccgctaattttttgtatttttagtagagatggggtttcaccctgttggccaggctggtctcaaactcctgacctcaggtgatccacccaccttggcctcccaaagtgctgggattacaggcatgagccaccacacccggccccgatctcctcttcctataaggatgccagtcatattggatgagagcccaccattgacttcattaaggtaaaatgaggtcatatccatgggccccaatccaatatgactggtgttctttatctccaggaaggccttgtctccaaatacagtcccattatgaggtactgggggttaggaattcaatgtatgaatttgagtggggagacacaatgaagcctgtaacagataggatgttttcttttcacatttgttccattacaaaactactcactgtggccaggtgcagtggttcatgcctgtaatcccaacattttgggaggcagaggcaggaggattgcttgagcccaggaatttgagaccagcttgggcaacataggaagacccagtctgtacaaaaattaatacataaattaaccaggcatagtagtgcatgcctgtggtctcagctacttgggagactgatgtgggaggattgcttgagcaacccagaaggttgaggctacagtgagctgtaatcgtgccactgcactccagactggacaacagagtgagaccctgtctgtctcaaaaaataaaacataaaaacacccaaaagtactcattgtaaaatgttgtgaaatgttgaaaagcacaagagggaaaataaaaaccctttagagatgaccatatctgtccatgaaaaaaacagtttaaaatgggtttatacttataacacctgttgtttggtaaactatttttatagtataaatatgtcatgaactattaaattttctaccacaacatcacttttaatgcctgcctcatggtccatgataagggtgtattgaatgtgtttaaccagtggagagtggggttttgattagccaagactgggatggagaagtagcagcctcatggaagggaatgatgtgagctccaagggcacagtagttggttacacttcagcaaactgcaaccaatgagaacagttctcagaatcaggtcgattacacttataagaagatgtaattttttgtgtgtgttgggggtggtcagggaaatagactgtggacatgagagtgctgctgcttctgagaagtcctgaagggtcctgagaatgagccagctccatgatttatgtctgactaatcagtctcaactagacctgatgggggcaactgaaagtcaaaatttgactctgcagggtgagactgaactcgatgaacatagtttcatagttttaattgagatgctgctttttaatgagtgactgttagtgatgagtgattattgcttttcccatcactcacttccctcactcccctctttccttccccaccctttatcccagatgaggaaaaatcattggtaaaacaaaacaaagagaaagggatttagtgataaagactcaccttgtttcacactgaagactgaaggatctaaaggagaagttcaggttggaccaggagggcttctaggggagagaagaggcagagagagcagggagagagcacaagtccccagctggagtgcagtggtgcaatctcggctcactgcagcctcgacctcctgggctcaagcgatcctcccacctcagcctcccaagtagctgggaatataggctctcaccaccatgcccagctaatcctttttttttttttttttttgtagagatagggtctcactattttgcccaggcttatctcaaactcctgggctcaagtgatctccagccttggcctccttaaatgctgagattacaggcatgagccactgtgcctggccccactgtgaattttgaatgatccaataggtgattcaatagggaaaaaatgcttattcctgttaatttcaacaactgagcctttcaagttgtgtttatatagccagcatggacttaggtttcatttgccctactgtgcaagtggaagaagaggaatgtggcagtgactcctgatttcatagagaaagcccacaaaacagtttagaaatacagagatgtcagctgcaatgctccttccaagacaaccattcccaagtgagaaaaccagtcagaattacagctctctttgggggtttcttattagaggacaaggcaactatttctaaagccttaggagtcttggctgggtgtggtggctcacacctgtaattccagcgctttgggaggctgaggcaggagggtcacttgaggccaggagtttgaggccagcctgagcaacatggtgagacccccatctgtacaaaaaattaaaaagaaaatagccaggcatggtggtgcgtgcctgtaatactgggtactcggaaggctaaggcaggaggatcgcttgagtccaagagttggaggctgcagtgagctatgatcgagccagtgcactccagcctgggcaacagagtgaaatcctaactctaactaactaactaggagaaacgaaaaataaagtcttaggagccttgcgagatcccttttgttgaacgaaatgagtccagggacagatttattcaacccaagacttaccaggaacagtgatgaatattcacatgagtctgcttgttgccccgaagagcaagatttatgttcttgtgaaagttttcaacctaacactttatcatatctgattctttgaactggctttttaatgtagagtggcagctgtctctccccagctggaggggaaggaggccatcttctgcatctccttctgagacacttgtgttaatgacgatggcttgcatttgggaggcaatttcatcagttggcattataaggaaaatagcaggcctgccaagctcaatttactggcagaaaaagaaaaggagtgaagaggatattacttattaactatgaaatgcggaccgtacagcacaacactatcttttgaattccccatgattgcagaatcataaggctttcttctggtgtgggagcatactgacacccctcccttgtgctgtggttgtgaaaaggattatgtaaagatgattgctactttcaggagccaccagcctctcaactttatcgaggatgcaggaaaaggtaattcaggaaggatgcaattcacttcaaacctttaacaaatccatgtcatgaaaacctaattcagagaaggtcatttgctggaaggtatattattaaataaaaagaaacaaatttttttaaaaaaagatcatttgctataatattgttttgcaaccattcaccacatgacaacttagacagttgttctcaggcattttgtatcttttttttttttttttttcaaattaatgagtctttattgagagtgtgctgggtgcctttctttgtgggaaaaccatattggccaagtctctaaagctgatgcacaccccctcattctgtgcaagtgagtctctcagagcctttcagcacccgcctccagtgcctagtgaggtagtcatgccacccgggaaagtgggcaatgctgcctaagaacagtgcccacattccagcaaactgtcatcccagagccttgcaacctcctctccaaacgcttgcaaaaaaacaagtgtgagcgctaacagactccttgccggaaaccaggtagccagagaagctagtgacgcacctgaggaggaaaccagggatcaggacacttcaaagacccagtgctggcaaggtgccccgggcgagggtgactgtcaggacatttctgcatcatccagttatgaaagctgattctatttaattcagtttaattaaaacaggggggccagttccacccaaaggcagaagacgctgtcagcggatgcagagtgagatctgaggaccaggaagcaaaagtagcacctccctcgaatctgccactgatgactgccatcaccccattactcccttccagttacccttcgcgactcactcatcccttacccctcgggaagacactgtccagggcagagtctcccagtccagggccctcggctctggtgaccacatgctctgcactaaaaatcagcaacacatgatcaggcaaatgtgaaggtccaaggcactagggggccagcatatttgaaatcgagatgcccaaagggcaatgagaccaggaattcaggtccctgttcccattgccttttgggaaaggcagtagtgtggcttagttgaactgaggacagacagggacttgctgggaaggggaaatcaaggtgcaggttctcttggaaggaggcaggatcacaagcgggtcctggggtggagagggggaaggtgtgagtggaaagagcaagtgtgcgtgacacaaccggcacagtcggcctctttctccactggatgggaactccctaaggcagagggctttgtgttttgtacattgttgtgtccccagcacctagaacagagcctgatacattgtaggagctcagtaaatatttattggatgagttgtaatatttattgtaaatattagtaaatatttattgagttgagttggtctttccagtgaagtggttgcttctctgtgaagctctgtgggaaacataaatggtgggagataggttacctgtcgttagggctggccatatgtgagccctataaccatttggtattcattcattcattcattcattcattcattcatggaatatttgcccagcttctattctgtaatatattgtattagtcacttggggcacaaatatgaaagccaacacatatttcttcaggacaggtgcagtggctcacacctgtagtcccagcactttgggaggctgaggcaggaggatcccttgaggtcaggagttcaagactagcctgggtgacatagcgagaccttgtctctacaaaaaattaaaaaataaatccagacagagcagtgtacctgtagtcttagctacttgggaggctgaggtgggaggatcgcttgagcccaagacttggaggctgcagtgagctatgattgtgccactgcactccagcctgggtgacagagtgagaccctattgttaaaaaattaattaattaattaaaaatatttctttaatacccatcatgagccaggctctgggggataccatggtgcctcaggctggaaacaccttctttggtagaagacacagactgtctaagccacagacgggggcgcgtcggtctctctctggaagtggagatgctgggaaaggctttgcagaggaaggcacatttgggctgcatcctgacagcagggcaggcgttcgtcaggctggggaggtgtggggcagcaccggagcagagtgtcagtgtgtgtcatggcttggtttccctcagaggcctgctggggccaccttttagctacactcttcacacctcattttcccacttcccagaccctctgaacatgtccttctctcttactggttgctcccagttttgctcatcccagggccttgcaccatgtgtagcacaaagattcattacgatcaataccagttagtctaggaactgttctcagagctcggtgacatccctggtgtgggtgcagctggggacagcagcgggactttgactcccatttcctctcatgagctccttggcctggctcccccgggaacttgttgtgagaggaggatcacaacaaggctgggcaggatgagggcatccctgggttctctgtgccattgaaatacaacacggcccctgccgcaggtgagtggatagtgggcccatgtggtttagcataacccagagccaatgtcctcaacagggctgccgatatggtagtgctcacccttcacctggaggcggctatgctccagggcacaatttgacacactttaacaggacagcgtgttggtgcattggactagagggcctttaagatctcttccaactgcacgcttcattctgatccagtgattctttctggccttgagctgggaacatcagaacccagtcccgtggtggctgccagaagatactgttaaaatgcaactagaagaatgttgttttggttctttcacacatcagctgctaatctttgtaggattttccccttcccagggttaagagagagaagaggaagtgaaaacaggaggggagaattttcttaaagcacctcttgccttgtagacaacaaccaaaaaccccctagggtttgaacagtgctgtgtacttttttttttttttgtagcttgttcccatctacagcctgcctcatttggttctcagagctcccccaggtgggaggcagaattctgaactgccccaattccactcttatttgcagacagggggcattcctggggctggagggaagggctgaggactggctcttctggcagaaggaggtattttacagtcattctggagaggcactgggggtttctgagtttcttcatgaaagctgggcagagccttctctacacctggtggagaaaggtctgtgtgaacagggattaagctgactgtcctctgggtggagcccttcggccatggaaggcggaggagctggacttccgagcaccgattcagcatctgctgatctctcccaaccaccagcctctcctggctattggagatctccgactccaaggcccaagccctcccagttgagagctcccaagtgcagtatctactgccaagacaggggtatcttccccagagtccagtaggcatgtttccaaattttcttgttgtttaacagatttcattgacaactcaaaacatgcagctggctagtgggaagcagggagaatctggaggcaaatgagatggagccctcgttctccaagaggtggctgttctcctgatgcagacagacatggacacaaacacagtgtgaggatggaatggaagcgtggtggggaggggaggagagggagcgctacacaggaccaaggcagcctcaccattgcacgttggagccctgatgcccagtcccagggcatagtctcccaatccagggccccctgctctggtgacctcatgctctgcactaaaaatcagcaacacacaaccgggcaagtgtgaaggtccaaggcgccagggggccagtgtatttgaaatagagatggtcccagaaattcaggtccctgttcccatcgccctttgggaaaggcggtagtgtggctcagttgaactgagaacagaaaggggacttgctgggaagggagattaggtggtcctctcctgcctcctgggagttttggctggggattgggaaactgggactggaagagaagctggggatcagggatgtcaggagagaaggggcagtcttcactttgtttggcagagatcaagcgcagggccatttggcatgccagcagggctgaaaatgagccactgtaggacctgggtacacagggcccctctccccctcatgcactccgaggcccattcttatgcctctcagacaagtatggtgagttgatcctagattcagtctgggttggggatcagagccctgagcctctcccagcctgcactggccagcccctcctgtccttctggctagtctctgctccttcccatctctgccctggactttccccatagagccttcactccctcatgcaatccccttctctccacttccgctgccctctcccaactgctcagaagctgtgcttccatgaggccttcccttaggagtgcctgtcttccctttctgagctcccctggttcagggggccatgcatatgacaactgccagagggttttggttcatttctttgttctgtctccaaggttctgactccttggggctgaacccaggtctccttcacctctgagtttcccccatcacttggctcttcattaagccatcagtaagtactgcatgagcaaaaggacaagatttatcattggatctcagaggatggcctctgtctaccatcttattttctgaagaagtggctgtttgctttccaggaagaggccggggagagagctggaaggagggtccatagcagatttctcccaggaatctggaagagctgaagtctcatgaggatcaggactgtgggctcagggggcacctagccgggcgcttgggaacgacagaccagtttgctggtttaggcaggagaaagggggtagaaatcttgttaatttctggcagtgtagaaatctacccagtctaccagtttgggagagggttggttttcagggtgaggccagaagaaattccacacagatgtattccagctccttctttctgggggtacagagtagggtgagctataaagagtgaagggatgggaccacctccaagagcagccacctctgacccaagaaccatgtttccaaatggacagagttgatttaacaacgactcaaatatcctacaagttaatacctacttctttctcctcaatcaaggcccagtcatccctggggagaagccttgagtgctgggctgggccctgggtggggaatttaatgtgctgtcattttactgacatctgtagaggtttgaaactggacaaacaggaagtgtcctgtctttaacacttgcacaatctcaagccttttgtgaaatatcaaggagtggaggtcgcaggggcccgtggtgtgaggtgctgtgaggtagccctggacctgtctctgatcctgagagctgggccctctgcagctgagaacgtgccctgcagccgctttccctccttagccgtcgtgcacaacctgtgctgtgagacgctgctgcttgcctggcactgctgttgaatcagtctccatctcctcattttgatggcagcctgggtttgttatccttcaaagatcgtctcttggaaggacaccagcctctgattacatttccgagcctgcctggaggcagctaagctaatccgacacgatttgggtggattcccttctggcctcatgttctgacacaacctctggcagcagtagggtgggaagatggacaaaataattacgccctatgagttgaaaggagaattaaaattaattccctcgtgcaactttttttttttttttttttttgcgccaggtgtggtggctcacgcctgtaatcccagcactttcggaggctgagacgggtggatcacttgaggccaggagttcgagaccagcctggccaacatggcaaaacactctctctactaaaaaatacaaaaattagctgggtatggtgggacatgcgtgtaatcccagttactagggagaatgaggcaggagaattgcttgaacccgggaggtggaggttcagggagccgagatcacgccactgcactcaagcctgggcaacagagactctcaaaaaaaaaatttctttatgagtacctagtagcagataattcagggctgttctctattccttttgtaacaggtctaatttatggcagtaatttttttaaaaaactatttttttcagtagaattttgtacatatgacttctataacatttaggacatttatccttgcttattataaaaatgatttaattgtagtaaacccggttttgaaaagagaagaataagagatcgcccataatcttaacactgaacacaccggatccagtttgttttcccaaccagtcttcatctgatagcgtgtttaattgcatgatcctaatatacatttactttttgaagaaacctagtttgcacggtcccatgtggctacataatctttctcatcatcgttaaggcacaaaatacctttaggatcataatttactcagccaacttcctgcagctgaaaatttaattatttcttttacctttcaaaccaatgtgtttgcttgtcttttctggactctgccctggggccccggcagagaggaggtggagccgtggaacagggttagacccaactcatcttcacgtcctgcccctcagcccggcccttggcccgacccctgccaaatggctccggctgtgttcaggtgcctgcggaaaggcgctcctacctgtcagcagtgtaagggcatttccaggtcacatctgtcaaggactttcattcatggagcacttgcccactggacacttgccacttgtgtagacacctcctctagcagggaccatgccatactgcatcttttattactggtgccaaggagggttcctggcatataaaaagtgctcagcagttgtttgttgagtgaatgaaagttaagagtgattgacaactcacgaggaatcctgtaagtcaccaggctcttgcccagcttgggctgcagaatcggacactgtgctgcttcacaggccttggggactttgactaagataccttccccatcccccaacttcaaccatacatttatgaaggtttaatagcgcagggtccccaccagaccctccagcgtaggtctatttttttttttttgagatggagtctcactctgcctcccaggctggagtgcagtggcgtaatctcggctcactgcaccctctgccgcccaggttcaagcaattctcctgcctcagcctcccgagtagctgagattacaggcacctgccaccgcatctggctgatttttgtagttttagtagagacggggtttcaccatcttggtcaggctggtcttgaactcctgacctcgtgatccgcccgccttggcctcccaaagtgctgggattacaggcgtgaactaccgcgtccggcccccttttttatttattagggtgatcagcttgtttccgttttcccgggacttgcctggttttatcactgaatgtccttcctcagtcccaggtaagcggggacagagttctcctagttctcggcatccagtgcttaacaagctcctgtagagggcgctggaggaaaagctcaggaggcaggtgccggatggattgagcagttgctgtcccaggtggaagatatcatgtcacccggacaccatcgcccggaaaatatcacgtcacctggacaccatcagactcaggagcgggttagaaaacaaccgatctccttaaccctcccccaggaaacgcttgtgtcaggaaactgatgcttattggccaagagggagtgaccgtgtcagacaagtctctgtttcttcatcctgagaaagcaaatcatgtataaatgaattgtggttgtttcaggctgtcaaactccaaatgtgttctggctgcaactaccctgacagcaggatgctccagttgcattgacctagaacaatctaggacagagaaaaaaaaaatcgctttgattttgttggggaggacacattttttaattctgtctttccaggttcttggcaggatctctgtaacaaaagtcaggctagaaagagagaagcatatatatttatttaatacacgttttatgtgatacaggggcttttgtaaggaaatgaagacccaaagaaatgtttaaacctgagtgtttttatacggggtttgatgaagagtggaaagtcatggaagaatatgataggacagaggggatgagctgagggtgggaaagcggggggaagctcagcaaggcctgtttgcccagtttctcttcttcgcagataaaaatgcgctcttcccctgagtatagggagggcacctgtcacctgaggttcttatgacctgcttcaagggaagttcagaaattggttcagcttaaaacatccactattttcaaggtgccatattttgggcctgaatcccatccattttttttcaagtgtgtctatcctgacacacattttttttcaagtgtgtctaaaactgtccattttcccctggtttatgtagacctatccaattcccttgggaaactcagtgggaaacatgaaatttactttcgaagtgggtggtgataatgaaaaattaatcttgctacgattctggtaagagaccagacccacacagaccctactttgggcattacctggctgaagccagcagcaaggcagcgcacccttctgacacgcacaggttgccaggggctccacatgcatcagccccctgctttggtgcatcacatatattgctgttgatgtgttcaactctgttgcaaagtgtttggaacagataacatcacagtcggatcatttatcaattctttcactcgcccaccttttgttgttgaaccacatactttgggtaataactacagtttattaggtatgctgtgaacactgtttttaaggagtgcctggctgaaaacacccacaaaatgatttaaaaacacaaagctaggccaggcagagtggcttacgcctgtaatccaagcactttgggaggccgaggagggcggatcacttgaggccaggagttggagaccagcctggccatcatggcaaaatcccgtctctaccaaaaatacaagaattagctgtgcatgatgacgtgtgctgtagtcccagctactcgggaggctgagttaggagaattgcttgaacccaggaggcggaggttgcagtgagctgagatcactccattgcactccagcctgggcaacagaacgaaactatctcaaacagaacaaaacaaaacaaaccctccgaaacccacagagctagtatttacaagttggaatgtcatcattgtgaatgtttccatctgcacaaatatctggaaaacgactattaggataccagcctttattactgctctattaagagaagccatttgctcctaagcccttcgctctcttaaaaaaatcattttaagaactggagtggttatgagaaaagcaccggtgcttttaaagatttgcagaagggggaaaggtcacttggctgtcagtttgagtttttatctcatagatggggtacctatcactcacagaactggagtcggatagacctgagtgggaatcctgtctccatcataaattaactgtgtgatcttggacaagttatttaacttttctaaacctcagtttctccatctttaaaacagagatgatattcataatatgtcattaaaaagtataacattagaatgtgtcgcacactgaagaacgtccaactcttggcaaagttcagtccaactaggcttgaacatgtttttaaaaatatcctgaggctctgctctccccggaagaagctgtaaagaacaattccagccctggcactgagacaattggatcttagatgagtcattcacttctcttttttggggcctcagtttcccctttggtaaaatgaagagattaaaccaaatcagtgattctccaaactttgctagtctgctaggcttctccttagtagcctctaattcagtagtcttgggtggggttcagacagcttccctaggagattctgtgctcaatctgagagccacccacctaagaaccacaaccacagccacctagactctgactgacatttgatggcttcaaggaggtattttaaagctattgtcccagaatacgtggtgtgttttttgaggaggaggaagatctatccacggcacacatcaggaagaggtggttaaaggtcagagagttattctgcagaaaatccatctgatttggtacttcctgaaatttttgacacccaaccagggatgtcttttaaaaggttccccactgctcacagattgacaggaaaccacaacaggggtaaaatgcacgcataacacagcatacatcagacatgagggtagttctctatatagcacagtattttttattattgtaggcttacaaatgatttaagtctgtgtgtttgtgtgtgtgtgtgtactttttcattttggtggtatggaaagctttggagggaagaaggaaaggattccacaaggaatagtttttccatatacatctcccattgcaagaacactgatctccgagtggattcttttgtcttgagtcttttgaattattgatccacaatgatgaaatccctagcacagatgttcaatcttgatgtcatttaatatctcgtacaacagcctgaggctaattttcctctctccaggaaaaatggtttgtaagagttgattgatcaactcaagcccaagatcacaaatataaacttcattggtaaagtgatctactctaatattatcttcagggattagaaaataaaaagtataaaaagtgcatgagcatacagtaagtgctcaacaaatgttggcttttattattattaggtgatcatggaattaactttcactaatttgcccttgagttataagccgctgttgacccggggatagtttctaaaaagacaaatctcctgcaactgcaggtagcagaagatagaccttcccattagtgctgtcttctcctaagcgtgttatccagaccaccatgtgggatccttgggatgattttgggtagtacacagaccatttaaataatgttctttgaaaaaaaaaaactttatttaaaaaatagagacagggtcttgctatgttgcccaggctggtcttgaacttctgaacacaagcgatcctcctgccttggcctcccaaagtgctgagacttggccttaaataatactcttttaaatagtacgtatttaggcctaaagagaactactaaaatatttgcgttaaggttattttcttttttgacaaaagacaatggttttaacatttatgctgatatacagtttccctttaaaataaatcattcaagtggaagaagctgattcaaagaaagctgctaagtaataatagcacaagttgtacccagaaatggtaaaaattgtgatggtggcatgcaaatgaccgagtttgagaagtactagatcagtgaactgaacctgtgtgctccccgttgggctacatctgaaaacattcgtcaacactcatttcatggagcttgaatccgtagtacagttacaaaacttctgtgctgtacaggaccttgaggtcatcgtgggaccacccctgtattttaggcagatggtttccatgatctggagatgttgtgtctcaagtgcaatacactggggaggaaacacgactttaccagattagagaaaaccatgtttgaaaagagacagtccttctatcccaggagagacacattggaggggagacgacaggacaatgagaatgtaaactatctacgttccaaatttttctgtacattaaaaaaattaaaaattctaaaaaagaaaacggaaattgtcttctgaaaggatctcaaggagcacatgtcttgaaatacctgaagatcttttacttggaaggtgatgacatgtactctaattgacttcaagttgtgtaagagggaggctgaaattataggaagacagatttttagttcagtgagaggaaatacctttagtgaactaaagaaggaatgagctatcttaagacatgatgggctccccaagactagaagtatttatttaaacagaaccatgacgaccttaggggacctgggaccaagtgctagacgggtgtggaggtggctgaccgagggtccttgctgccccttaaagtcaaggagtttaaggcagcctttcctttctttcaagtggctcctcaaagggagccattatctgcagctactgtctcagttttatgtaaagagtatttatcatttgggaatttcccctccccatataatacttttgactcctgaatgcatgcaaaagagctgtaagaaactttctggtgctaaatgagaaaatgtgtgaacataaatgagctagtttaactaaaagttcaccaaaatgtattttaaacatcaggctcttaaaaactcaatagtttgaaatttgcattttaatcagcgtttggctaacaatatgagataaactattagagaagtgtaggtcattctggcaaatagaaagttccatcatttcacacttagaaagctgccacgaagagcttattcttggagtataaaatgcagaatttaggttaagccagtcattttgtagatgaaattgtacactggcaatttcttatggttcaacctaatagtaaaacatttataaacaattgtatcattacaaatacatttagacatcgttttctgctaaactcagtattttcctttccatcctgatcaaagaaacattattgcagtaagccacattataattcagcacgatttcttctaaaaaggctccgagttcctttgagcttgttattgtacagtggatttttcatttgcaaagacgttaagccctccaaatgtgcaaatcatgaagtcagttgttgttccagcaaggtttgcccagcggtaaaaaacaagataaaactaatgcactagctgaaaccaggtggggagaccatgtgtggtagtgcttgggggtggagggaaactatttctgaaatgaggacttaaagtataataccagcttcactgcctgttcacgagaaaccaaagcttcaatttaactgcaggcaataggagtttcacactgtcagcaccaactgtctaaaatccaaaactagtatctaaatgtgtaggatcaaaaccaaaaatctggagggatctagttaaacttcaatatgcatgaccccagattcccctttaaaatatagtccaagtattttatcttttccatagggcattgacattattgtgttaatgtgaaatagctatttacctctccaaacctcggctttatagaatagataattatcacatcctgtaggagagccatttgaaaagacagccttgtttacagacaggagaagttacagaatttaaaactgttagaaaattgggggactatggggctgggcgcggtggctcacgcctgtaatcccagcactttgggaggcagaggagggtggatcaggaggtcaagagttcgagaccaggctggcaaacatggcaaaatcctgtctctactaaaaatacaaaaattagccgggcgtggtggcgggcgcctgtaatcccagctactcaggaggctgaggcaggagaattgctgaaacccaggagctggatgttgcagtgagccgagatggcgccattacactccagcctgggcaacagtcagactgtctcaaaaaaaaaggaaaattgggtgactatcgaggattcccctctcccatttgttaaaaaaaattaacaaaatttaggccctcagactttatgcattcatactcaaaataaatgcactaaaaatcaaggagcagtaagggcaccaagaaagagcagtttgatctattttataattaaaacaggctcgagttcaagctacttgcccagcaccttttgggacatgggaaaaaaacaaagacctctaccatatcccacattctctaaactgagaaccatctcaaacatcaagtctacatatatcactctgaccaagtggatttttacatcaatcttcccctgctgaggttcagagctgtcaaatcccaactgaggccgggcacagtggctcacgcctgtaatcccagcactttgggagactgaggcaggcggatcacctgaggtcacgagttcaagatcagcctggctaacatggtgaaaccccatctctactaaaaaatacaaaaattaaccgggcatggtggcgagagcctgtaatcccagctgctctagaggctgaggcagagagaattgcttgaacctgggaggtggaggttgcagtgagctgagatcgccaccactgcactccaacctgggcgacagattgagacgtctcccatctgacttaattccctcatcaactgattgccagtgttgtatggacaggcttggtctggatagacttgtcttcccactgctatttccagccgggcaaaagaaccacttccattctcttagagctttcgataccacagtaaataacctggtatcttgctggggcagttttccacccatattaaactacatctgccccattttgactactagaaaatgtatcaaagaggctgtccaatttgtctgagatgagatggctgaagttcttagccaaataatggccaaagctcaaaacagatctatttgatacaaattcgttctttgacacacaaggaaacagatgtcaagagttgtttccacccagtatcaagcttcctcccctcctctctcaggaggctgaacacacattcctagtcactaatgtgctatgaactgaatagcagtgaatccacttaaattaactcatgctggtacagagtcctctccatataggcacaggacttaacatttatcatttagccattctttcaaagataattcaaacgttacagatttctccatattcctgttaatgtagaaacatattccctttacttttggaatcaaagaccaacttccatatgtgacaatgactataatgtaagaaaactgattttcacaagtgtcttgtacaaataagctactgcagcagtttatagagatagttgggtgagacaagggccctgagtacacaaatttataatggctgagtggtcattccacactgtcactgcattacagaaaaaaactggatgcttgtcttgcatacaaatatgtagtgcattaaaaacactgagacctttttttcatttttttttttattacatttggacctttaagaaacatataccatcagatataccactattcagtaaaaatctattctagtttttgggaagcttatgtgtcacaaactatcttgcttctagtctccaagactttactaagtttatcaaaaaggtgggctctggtctatgggatcctgagccttgaggtttggatgttctgattattgtaaaacaatttcaagtggattaacttaattcccagctgtttttcttctggaatgggctaatcagtttgaattatctagtccattacaagaatattaaattccttgagctttgtgatctattctgtctttggaaaacctggtaaaaaagtaattttttttctatacaataaggatggatttaccagaacatacccagtattaatcataacaaaaagcagtatagataatgtatatgtgctgtgttcactttaataaccacttcataagtaactactctaactatggggactatttctggatcagtaagatccaagtgtagttagttacacactacactcagcttaacacaactcttggtatctgacattgattaaaagtaaaaaagggtaagtgaacaaatacatactcatacatgatcacgtttttaagaagctaccctttgcagaagtaaacaagagaggagactttcaggaagctactgatggggactgggaaggtttaaagctatggctttggtaagcaccccagtgagctgtaggaaggcattgtaagagtagattctgcagcatcaaaggataattctctaaaagaggtgggtgttttctcaattaatctaaattctgaggctttcagcagttgagggctagaaacaagatccaaagaaaagagccatcttcacaacacttaagaaaggtgactgactgagccattaggctcatgatgctaaatggtccaaaagcctttggtggtgtgatatggacaagaaaaaaaattaatacacaaaccacgtaacaccattaaaaccaaaaaacattttttcattaaaaaaagtatttagaacacacaaaacaaggcaacacttattcttttttctcatcttctggtatgggatctgttggtggctcctccactgttgcactgttgctctccgagccagtgttactatcactggttccttcctctgccatactgtcgaccccctcctgcccactctccttgtcctcaggagtagacgtgccttcttcaccattctgttggctctctgttgtttcttcaaggtgtgtctcctctgtaatcacacatttgtcactgtcagttccaagatgaaattttactctagttatgctgacagtatacagctgtgctgtccaatatagaagccactagccacatgtggttattaaacccctgaaatgaaccagtgtgactaaagaacttttaagaatgttggaacaatttgggtatgaaaatctactttttagctgtaaatgaatgaaatttattaaataaatgcagatcaaatacttccgatgaaaatttagcttctgaattgagatgtgtataaagactgtttaaaaaaaggaaagctgattttaaaaatgttccttctgtgttgaaataattttatttaggatatgttgaattaaataaaacatattgttaaaacacttgttttgcttaacttttaaaaatatgtcactagtagaaaatataaaatttcacgtgacttgcattttatttctgttggacagtgaatgagagttagtctgtagtgctatggattaaacgaggagaaagcagttgtagaaataatataaggttggtcttttagacactttgtttaaagtcatgctgggctgtttcctgtaagaaattaaaagcatgaggttttagctctaatagtctcaaacgattttcttcaggttttttccttgaactaggacagaatctgagtaaagacctgcaaaccttaagcataagacatgccccattcatagatgccaaaacagaggcaaaggactgagtgtttgtctagttgcaaaattagcaaaaatcagttattttaattttcaagctcgttttaaccacaaaaatgtgctcatgctccaaattcattacaataaaaaacacattcatacaaaacagaaagagactcagatactgaaacttaaaatatgaccatttcaaatgttaatctgctggattaaattttgcagaaatacctggtaaagatatctatattccattacatgttttccagatggttgtcatctgagtaccaagtatgactactgtccctcccacttcttgcaacgatgctccaggaagcctttggttttgttttccataactacttttagcttagtcctgtttacacagtgtactaggcagtgttaaaacagtgccatgaggtaaggtgatctcaaaattacaagtgacgatcaatgtaatcagtactttatgtaagttttatttatacaagttattattattattttttaccttgagggatgcttttaatcaggaaaatcagtatacctagaagtaagggtttttctaggacagagctggcaatttttttctgtaaagagccagatagaaaatattttagacttcgcaggccaggcagttgttgttgcaactactcaactatactgttttatccccaaagcagccacagacagtatgtaaacaaacaagtgtggctgtgttccagttttatttacaaaaacaagtggtgggcaggattggcttacaggtattactttgcagaatgctgtcctaggacaccaaagacaattaatcttaacggtaataaccacatcttgataaataatgtaagcatttaaaggttaaaatactgaatgtcaatatcatgtcaaatttagtactgggaatcaccctcagtggcaggtaccagaatacttgcacttagaaagaaaaacctaaattaaagacagccgtacaaagtcttggcactgcctctgcgtttgttgctagtgggttacctgtctccatcggaatgttctcgtcgtctttcttctcctcgcctttgttagctgcttgttcttcctcaggaacgatgctgctctgactgcgctcagcttgctctgcggcctccttctccctttcctcctgccttttgcgggcctgttcctctgcctgtgcaatctcagctgcaattttctccatatccacttctactttcagaccgcacaactaatcagaaaaaaacagaactccgtaatgttttttccttataatttttgagccagatatattctttcaaaagttggttttcttgcctataaactatatatatatatctatacacctgtatgtgtgtgtgtgtgtgccaaaaaaatgtggttctaggtcttctctgaaactcttgggtctacaagaaaaaacagcagctctagcagttgtataatataggatattccagagcagctggtgaggcaaaatagtgaaagttctggggtatacataaggcttccgttttacattttgggctaccaactagatttccttgtctgaatgcaaagtgcaaattataaattacatttaatgacgacatttgatgaataaatcacaataaaatgaaagtaattaatgactgtatgggagtttaacatatcagagggctctagcatttacaggcctagaagatatgtgtatactctatgatatttcaaatttattgcaattttgccagagaatgggaacaatcttataaaaaaaggatcctacaggtttataataaagttagccctgtttcaaagtgaacaacattcaataaaaacactattttggaaaaaagaatgaggaaaaataaagtaacaggtatagtgataaaagtatagttaacatattaaacagatacccttttaagttcattgttaaatgaatctgtgctttccaggaatttcctcttcttctcctggtgtcgttcctctatttgaagaagttcagcttctagttttcgctgcaagacaggatcaggcttcataattgtgtctcattttttaatggtccatactttcaaacagtgtaccaaataatgttttgaactttagatcatttatcacatgagtctagctaagatttaaaaaatacaaaatgcagcacaaagaaatgattatgatcaataggtaaatgttaaagaatactgtttcaggcctgagcaattccttgggaaaaaatatttagcatagcagtaaagattgataggatgcctcaaaattcttaagttcacacgtatttcttaacgaatatactttccattacaaggttctatattatagtttttaatgacaaacttattaaacatctgggaaaggtccacttccttaaacctcttctccaaatcaggaacaggttagattgacatatttaacaggtagatttaggcatggtgtaggaatcatatcacctgggatttgtggtataggcacatcttattgaaatgaatgttttatgactttacctgatgaaccattaaggactggacctgccgtttgaggacctgcattctagctgttgtgacaactgaccgaacgtctggcaccacactctcactaagaatttcactgatgaggcggtggtttctctggaaacgggcggtggctgtatgcttcattgaaaagccatcatcataatctggagtgaacaaattgttctggaaatcaggtcaccagtaaccataaaaaggagtgtaacaatgttaacacttaattaccaacgaactatggccctcactggcctaacaagtggacctgcccagcgtcatgggagcactggggcagttacttgataaaaaccatacagaggacgtaatgtgttcattggccaaggtagtaatttatctcacagtctttaagtgataatgttgtgtctgagaaggatttggctaaaacataaacgagatacaacatgtctcttctggcttcggaatcaatgtgaaggctgtatgtgatggcagtaattgaaattctgcccaatgtttcactctcttggtagtaacttaaggcatttaacaactaatgaacaacatatgaactgggcagtgactttgtcacttgtagcactttaaaaatgaatgaaaatgcccatttgtaaaattatgacagcagagaatacatcacctctaacaatattcagtttcccaggccctcaagtaattttatagaagaaaaataaatgtctgattccaaatttaatttttgtcagtttacacttagccagctgttgtcagtgtgtaatggtatgacccaagttcatacagtatgggtctggtttatatgcttctgtttcgttttgagacagaatctccctcttgttacccaggctggagtacagtggcccagtctcagctcactgcaacctccacctgccaggttcaagtgattcttgtgcctcggcctcccaagtagcaggaattacaggcgcatgacaccacgcccggccaatttttgtatttttagtagagatgggatttcaccatgttggctagggtggtcttgaactcctgaccccatgtgatctgcccatcctggcctcccaaagcgctgggattacaggtgtgagccactgcacacacactacaggcttatttttaatagctatctagtgtttccttaatctcagtctttgctctatcaccttcatagtttttcatatatctactaacagcctgtactatcgtttacttaatatttttctttaaactaactcacttaaaaaaaaaaagagctttctctttagtaatacatattaaaacaaacgctcctctctgaaccacttaatcacctcagtgacccaccagacagggaggaaccacacttaagaaaaccttgttacaggggaaaccctgttacagaggcctatgttgcgctgctatgtcagtttagcacctcccttattgtctggcacttaagtagttcctaaaattctcattattataaatactacagctaaaaactgttgtttttgtaaaaagttaaaaaaattacttttgtttccttttgagtaatttctttaggaaataaacttctgaaattaaaactactgggtaagatacagtttttttaaaactctgtaacctttctactttttaagagtttttcacctttagggttatatatggtacatctgtgctacatctgtctaagttatctgtttttgttgttagcttttgttttcttctttcatttatatggccccagtgttgaccacagatggggacataaggtctaagcaatttgggcttgttcttctttgcatgttagtcgtctgcttccttttttgggggaatggcttctctggttatgatctaattgaacagctatttatcctatgatgaagaggctctcactgaataaaagccttcattgtcttgtgtggataattgcacatgccctcttttttttttcttttttttgagactggttattgccctgtcatccaggatggaggacagtggcatgatcatagctcactgcagccttgaactcctgggctcaactgatcctcctacctcagcctcagctggagtagctgggactacaggcacaagccgccatgcccagctaatttttaagtatcctgtagagataaggtcttgctgtgttgcccaggctggtctcaaactcttggccacaaacgatcctcctgcttcagtttcccaaagtattgggattacaggcgtgagccatggcgcctggcaatgtctatcttttgatagtcctctgttaaagaagtcagtagctgttgtacttcatgcagatgccacctttctgttatgtacatttgacatacatttccacctcccaagtattcctctttctaatcattttcgtactggtatgctaaagacattctcatattggcatcttaattgctacctgaatttactagcaactttaagacccaatctgaaagttaaaaacatcataggcccaagtttcagactgtttctgagtgaatctctttagtccttctcagtgttcatggtgttaatgaaagctttagttattttctacttacgttgctagcctttgtttcctcttgtactgacctccatcctcccaatatctgtagactggattgtcttctgatttttagttctgtatgtttctcttgcattaatcaccccatttgagtaattaaagtgtgaggatgctagtgtgtctttagcactgctgattctgcttaacattcaatactgtttctattccatattctattctctatagtattacattccactgtctgtatttatgagaacatttgacaatattccagtacattatttttaaaaatgacttctgtttttccccacttttatcaacttattcttgtcttcaggtactattattgcttcctccctcattgatattgtctttaaagttcttatagccttcctctttgttactgctactttaagatgggatcttaaatcattttcctgatgttcttgtcgcttgcagctaaagcttctaaccttttgcacatcatagcagtatacagagaaactattaatgtttatacagcacactagatatgtggttgagtgtgttcacactgcaggtggctatctctgggtctcctcgcagcttcagaccctgcctggctgcacaagaccagaacaatcagaacacctgctaactactcatacagaatggcaattaggaagctctgccattcgtgtgcatgtatacaatttgtatgggtataccctcatgtacacccatacaaatagtagcatgagctatatttatacattcttattggatttctgaattaaatggaaaggaaacttcatgtttccacatactcattagcttctcccttaagagcctttaattcagcgaatttagtgaaccaataagaaaacaagatataattagaatgcatttagctttttaaaagcagatgaggcaaaatcctgattgtgatttaaaaacctttcgtgcattttgagtacaaagattttgataaacaatcaataatttttgctattttctgcactgaaaaggatatttctttttcttgtgggaaattcacatacaaatcttactcaatataaccaaaatactaagacgatacttaaattatactttcttttccatttaggataagaaataaaaacttatacttaagagatttctcatatcttaactcacagagaaagcataaacaaaaccccactttttttcttttaccatctggatcttcagcaggctgaatgctcatgtacggttctcctttctccatgcgagattgtctctgtcgactttcttcctctaaagcagcttctgcacgactttttgcatttatgtaagcaaggtacgcgggggaattatgataggccttcatagattcattgtactctatctgaaattcaaatgttttttggttttataattaacattttgcaggttataatgcagacctatgttatctcacttgaatatcaaaagatatgatgtaaacagggtgttgggataattatctcctttttacaggcaagaaatctgaggccttgagaaactgacttgactcaggtagacagagcctcagtactgcatcagtgttctgaccaaatcttatgttacttttataaatagtaagccaatgttttatgtactttacacattatctatcccactgtgagcccctaccctaccttttctgcttcgtattcgtttaaatattcttgtttttcttcatcagtgagatctcgccacatgccaccaataatcttgccaatctcccacaactttaggtcagggttggaagcctttacttggtcccagaccttaaaaagaaaacagatgaaatgttaatactgatgtctaaacgtatagacctttaaaaatagtttttaatgtggaaacttttcaacatacaaagcagagaaaacagtatcaaatttctaggtactcatcagcctacttcaaaaattatcaagaactggccaatctcaagttatctttgccctactggattactttaagatagatctcagacatcacgtcactcacttataaatacttcaatttgataagcaagaatatctccaatcactacagacacttaggatgagttacttcaataacatagtctacgtctctaaaagttcatgtgaatttagaagaaaagtgcttaatttgcataacacggtacatcatattatcaaatacaaatataatagtcaagatcaaaaggtttaacatttctagatagtggttataatgctctgccttttaataaagatattggctactttttttattttaagagtaatgtaggctcatcaccaaaaaaaaaaaaaaaaaaaggaaaacttgaggaaaagaaaataaaaactaccataagcttactgcttagagataattattgtcttctgtgttttcccccttcaaactaacatgtggttgctattatttttataaaaatgagatattaattcatgtagtcttgcagtcctccttcacttaacattttcctcacgtcattaaatattctccaaaagaaatgactttaatggctatagaacattctatcttaaggattttaacagtttatttaatcacgctcctcttgttggattttagttctggaattttgaaatcagaactaattgctttaaaaaccgtatttttttggacctttcctctgaatatgcacagaaaagctggctaagccgatctaaagttggatgttaagcaaagaagcagcaaagacagtgtcctcactccttaccaggtcctaagcacctacctttctgctgtacctcatgtagggcatcagcggcttatctggtggctttgggggttttggaatcgtgataccagaggatgcctacgaaagagttaaatacattcattattcaactgtaaggagttcactggcaaactgaaaagagagtcccttaaaaaattctaatgcgcctttcttctattcgtccaaatattttcttcactgaaaatagctatcactgcaaattcagaaatgttcaaaagaaaatgactttaagcacataatttttaaatgttttacttagcagtttattgccaatgctttgacaacctggctgcaagaacaaataaaatattacacagtaacccatacattgaaaatatatggttatatatcaaccgtctcaagttcaggacattacctggtaccctcttattctgctcaattaccattacacatacagtcaacacttgattatctgcagcaggatctgaacccttaacacttaccattctcacactgtctacaggggccttaacctattagcactaggaatgtactcccaacaccaccacaaaaacaacttcccaggttcaaaaacaaaaacaattagtgaaataacaaaccaccttacctcctttgccaggctagagattttatttctcttaaggttctgtctgttacctagtggttttcttgtaaaggggaatgagaagtgtgaattaaaagtcacacattgttttgtcctgagtcctaatcacagtgtaaaagcaaacaagtttatcaggaacagagaagtggcagatatcgggcctgattacgttatttttgaggtcttatatcaagaagctccattccattaaaaatgttcagttttatgggaaagacagaggaaaaggaaagatgtgatgtacaggaaaagagagacagaagaaaaggaggcggagggaagactgaaaaatattttttaaaaaggtaaagcaaaaataggtgaaagaaaaaataaaaaaagaaggaaagagaaagataaagtgatcagtttttcctgtggcttaaagtctaggtgagattccagacagcctctggtagaccacccagataacacccatctaaaagtatctatttctgaactttttagtctcctgttaatatacatgactgcatttgattaaagacccagaataagaaaaatcattgctatttcagacaatttgcaaattttcaggagatctctgatattgactctccctgctaggctggagaaatgaagtgttggctttattttaattatcgaaagacaggattggcaaatccttataggaaaactaaagtaacattttgttcgcttccccttctgttgttgctatgataaaaccccagagatactcctccactctgggctgggaccccaatcataaccttatttttcatttgagggctcagggattagcatgtttgtgtccttttccactatgatcaagaaatgtttcctcttcctacaagggtctctctccatccctataactctacttcttcaaagcatttcgccttggaagcagtatttcctctctttccattcctcccatgcattcttgtcacacctcatgctagtgcccaggtagacagacactgtttttggccagcagtgggtaagagagtgagatggccaggggcatggaaactgtcaaaagtggtaggatgggcagccaatacagggaaacctgtatcagggtctatagttctttcaaggggaaagagaattcctataagactaaccttatggattcagaggaacagacacacacaagtctgcttcttcacacataaagttactagaaagtatttccaactcatatccaacacaaaccttcagaattccatgaaatggattacaaataaagttggaattgtgcccataactgaggtggtaagaccactgtcaaaattttttgaaattaaagaggtaaagaattctaaaatgcctatgcttccgagctttaatatgaattaaaacactttaaaaacacagtagtatttgctctttgatatttttcaaagaatcacattttatattaatggaattgctatttcccctcctttctcccaaagaaaggtacacaaatcatctgtatattgagaccagtcaacttacaacaacaacaacaaaaacccaaactaaaaaaacaccccaaaacaataataaagttaaattccagatggttttcaggatagtaaagatttatatcattacacacctccaatttatttaacgtctcagacagacatctttctacaatgtcttaaacatttctttaaaaaaagctgaacatactttagaccctttctggataagattcaattagaaacaaccactgttttgctgtgctgtaaccctctgtcagatgtcaaaatctgttgttgactctttcaacggcctaggggctatgcttttggagaatgtgtttccatttttgaactgtttctttccttgctactatcaggaaacccacctctagcagcaactctctttccaattttctgctttcaatttccaatggggaggcgggtagaactgtgcttacagaagagcaaggtcctaggaaatctcctatgaataaagttcatggttttgtgaaatttatcttggttactcagttttttgttgttgtttcttttgcaattctcagctgtttctctagcaagaacttatttaagagctttcttctggggcagaatttctattaatgtacagaaataggctgtttttaaagacatttttgtctcaatgtgttttcacacctgtacttaagagaatgttaatcatcatctgaatgaagaactgactaggagtgaattccatcttgtagctatcataagcactccaaaaggtctcgacatgctatacaaagtatttactgtctgagaactacccaagtatactggagtcatcagggaaacccaatgttctctacagcctaccacaagctactggacagggcttcacagattcgttccttgaaaaccactaatgcaatctgcgcacaacaataccatacaggagcttcccctcacccccaaaagtaatgcataactagggtcatagtaaaatcaaaatgcttttattatggtcaaaatcagagccattgagtcctaacagcttaaactagatatagaaagcagggcaagtagtgtaaaacctccacattttctaggcccttcttcatatagcagtttgattatacttcaatttggtgttaagaggacaataatacaaagtaaatgtccacaaaggaccaaaacaccaaattttccatgtccaacaactctctataattaatctactatgtagctagtgtccacgccaaatgttcagttcttaacattcgccaagaaggaatgggaagaaacagatgagtgacttcagatagggagtacactttctcttcctagtctccatcgaacaatctcacttttttaactgagaatcccccacagctacatccaagttaagagcaaaatacttacacaaaaccaaaagacaaattactgtaatattatagttatcatttctattccattaacatagataatcaagaggtgactgtatagagctattaaatgcaatcattcttgtttactgcccgtgaaaaaattgctgcattaacattaagatccatgattgattccgttcattgtttaaactgaaatgttctttatcatttgaaaaccttgccatccattacacttgtgaaacaacatgtttaggccagggaaaaacatgtattgatgcacataaaaattgtatgcattgtgaaatgcatacatacacacactttgtcagaattctttttcagataccatgaaatatgcatggcacataaaacttgatatgcttatgaagtacatattatgcagaaacaatgaaaaatttagacaaacaaaacctatcaagctaagcaatatgcttatcaagatagacattcatttgatagctacaagctttcagttccagcttgactacagggtgagagggcttttttgaagttacattaatagaaggcacttgttatttatgaatacagcaaacaaaaaccaggtattaaaaactttacagccattctgggttgtataaattctcaccaacactacattccaatgtagtatttgacttttggattttttatctttagtaagtcatttttataattattggcattttttggtgcttaaacttttttgaatgaaatttaagatgattctaaactaaaagatttgaagtgtatcatccaattttgatatcttaggctgatcacttaaatgaaacatgctaagtttcagaaatcctatctcttatactaaggattagaaatgcacttctcgttgtacatatctagtctgatacttcaaattaatttcattcaaccttcactctgcatttctttgaggtgacattaaaacgtttttctctttttcactgtagagaaatgagtcttagttagaaggtcaactactaaatccaaaagacaaataactatgggtagcgattcaaactggtgtaccagccaaaagctttccagccctgaaaaagccaggtctgaaagaccagcctctactagaaactcaatccttgagactaatgccaatcaccttataaaaatgaaaaatactctttatgtcaaaaaggatatttttaccttaagaaattctgtttgtttacatacagtataagcatcaagtgctcaaggctttaaccctaccaaccaccaaacagaatggatttttcttttcttctatatacattccagatctcactatttattttttcagtgtgagatgctacaacgaatgttgaaaatactcaaaaagctaggttaaaaaattttttttaaatggctgtgcttatgattcaaaaagacctaattctgaaggcatttctggtcaattccagttgtttgccggatgctgtaatagttgattctcctaccgtgacccggctgttggtgcccgggttccctcccagcctgtagttgttgtaggcgagatgactgtatggattgtatcccacaaaccctggtgtgctgggcatttgctgatggaaacaaatgagacaaaaacacgaatgagaaatgagctcaaacgaggaaaacacagaaatgaaaaatgatctgcatatggcatgcaaaagcaacctgaatttaaacaagcaatgatgtgttgtaattgttctttttttccactgaggaaattaaatatttttctttcattgagaaacctgtctgcagtgtcttttggttgtttttctctttcttttttgcaggggctgggggtgtttgtgtgactgtgaatgtgtgttttgttttttgaggtaagcaacacactgaagtgtttaaaacattcaggattactttatggtcaacaataggataaaacaacttagcaatatatgaagactgaaataggaaggcttgaagtgtgatcaactagaactctgaaaacactacatgcaaaacaaaatacaatttatttgacatgtggatgccaccaatgtatttatctactaaaaacaaaaaaaagaaatggatctgatttcaacgacagttttaaatcattttatataatgtgagaaatgagtagagactcaaatcgggaagccaggatttgtcaattgaaaagaacatatgttggatttgatggatgtcacatacatgatttaaaacaaagacttgtaagaaatgcatggatttcattctggggtactatctgatctttttaacccagtcattcttttataggatttctcttccatttcttctttgatccatcttccactggtcaatcatgaaaacatttctgcattttgtctcaatgtgaactacttttctagtttatagacttcttttttcatctagtttcctgatagctctcaccctttcaaaatacaactgctcatttcagcaacagaacccttggtttttgtgaattatgtgttgatgtaatcacaaatgggctcttatatagcagtagccttggggctaatacaatgacactcaatgttcatgagaaccaaggcataatgcatagaaagaatatagtagagagagaccaaaattagggtattttaccttgtaaaattcaatcaaaatatgtgacaatttcatttttacatgcaattaacaatatcggtccttaattgtataatgtaaaatacacttaacacattccaactaagctgtagctgttacaaaataaacacaatttcctaaaacatgccgctgcacatatccttagtacccaaaagaaagacatttaagcagatattacatttgatactctttaggagaaaagagaacggctgatcaatttctagtctatacagttagaaaagacgcaaataaagcatatttaagtaggcaaaacacagttgaagtatcaaaggcatgaaagaagtgtatattacttgcagcggtacatttgggtggcagaggtgatagtggtgatagtgttggtagtggtggtgatggtggtggtggtggtagaagtaatggaaagaaaaaaggaagaagaataattcatttagtatccattctgttggatgttttaatccctagtcttctatattttgtgtgttaatgtgaaactataatgacacaaaaatataactaaagaaaggcaaaaaaaattcctttttatgcataataaattataaggggacacttggtttttgaaatattttaatctcaaaaaatcaagtttgtcaagatgatgcattgtcagaggcagtatttttgtcaaaatgacaccttcaaaggtagcataaataataagaatcactgttcaacattatgaggcaataatgttataaaaataagggaactaaaaaaaaaaaaatggaaagcaaaacattataattataccatttccaaagctgaagtacatggttagctctttgaggtcagaatctcaattgttcagctccacctgtatagccactagcagaatgccatggagatggtcataacaaatgttcttcgatttaagaaagaaaacaaagcaagcataggactttatagtctactggaattaactttagagcctgtatatgacataaattgaaatgagaacatatggtacggtatctcttttctaaagtatctcactaaagaaaaacaaattgttgataaatgtaactaaaatatgtatctgagggttagtaaatatgagtagttttttagcggagaaaactaagttacacaaggacctaattagtagtgaaaagtagactagcctgaaatttaggtggtgggggtatggaaggaaggattaatattaaagaactaattttgtagaatttggtcatgctaacagtgtttttttaaaaacaaacaaaaccccccctcccaaaaaaccaacaaggaagccatttcagcaagacctgaacagttactgctaaatctgttttgtgggttggaaaattattttacatgctgaccaagctgggccagagcttcctgggtgaaaaaacacgttcacaactacttaaaacatatatacttccaaaccaataaaatataatttatggagtggaataagattcaatagcaagatctgccccatagataatgaaatctttacttgaacagcttgaaaatatttacaatgagtagtttcagaagctttattgtttaatatgaaaattttagagagagacaagaaaggagagaaaaacataaccagttgaaggttaggtttaacaaaatagccagaatgagcattcactcagtaacaacttaaagactcttaatagtgaagattaataagaaagaaatggtaaaactttcacttatttcccatttacaaagaaaaaacaaaacaaactgagcacaggaggttggagttttacagtactgtttctttaaatgttggggttggttcaaggaaagatgcaaataattattttatttagtaggaagtgcttttttttttttcttttaagctgaatttcatcctgttgctgtgatgattgagtgactgtcactggaagacatctgggtttttgtatcaaggccagagttggctattacattaacaagaaaattaaaacttactgttgcaggagctggggtgggaggtggggcataagatggtctttctgtttgaaagaaaataaataacttcttgtaaacaactgagatataatactatgcaacaaaactaccaatggtcctgttttgaagaaaaaaaaatgagagtattttggaattcccacttgctagggcattagtctcttattaacatagattgataaatataaaaattgaaacttacttgacattttggaagattaagttctcagttccttaagaatgaatctgagacactaaaataaaaaaaaaaggaaaaaaaaaagagaatcaaaactcagcaagcatacgagaatgttttcctaatgaatagggtaatttaattggtatttctgagtaaaattacttcaccttaattcctagtaattaagccttttgtgtattttaactagttcttataggtcatttggttgattagaattaaatgactaaaataaagtactggggatatttagaaatgtactttcaggttttttcttgtgatactaagctacctcttgtatggaaaacattttgctgacgccatgtaaacatttcatcagactgatacaaggatgagaatagaaagtgatgtattatcagggtccaacgcaacaaggcctaccagatactgacagctccctgatcagcaactgtatcatgcttttgggataacaatttttattaaaattaggcagcattttattcctggaagcagtgcaaaaggtaattggtatgacaatgaacttcacattctcttataatggtaaatagcttcataaatgctgggaataaattttgagagtctacctgaaaaacttttattcatcattcacagcccatttcaaaatttttctcctcaagggaactttcttgatacattacctgggcagaattaactgctcccccatctgtattcctatacagtttacacagatctatattattataacttttttttaacttatcaatatggctagattgtatgctacttggaaagagggaccatgtcaggacctagctcaattcttaggaaattttttcctagtattaccagctcacaacataaccaggcacatgtgagcttgttctttacatcaacatacatcacaaatagtgaggtacaaaaagacaaaaattcatctttggaaagaaggcaaataaacttctatgactattggaggtatttgcaaccaaacatgtggaatagatctgatttttcgcttctattattaattttaaggaaattccctggagcataaggaatgagtcctggtgtggaaagaaacagctcattttctcaatggtccaacctgagtctttccctcttaaagaacagccagaaacctttgactctggtgtagatttcctttctgctcacattaagggagctgtcaacatccagcaggcctcgctgcaggggaccctgacaactaacataagctccctgtacgttatacttcattgttaatactttaaaattattgctctcttttgctagaatacaaaatttaagagtgggcttgtacatttgtccaccgttggatccatctttggtgcctggcataaaaataaatacccgataaatatttgttcaagaaatactttatacggggtacgcttatgacactatttcgcttaacactcacaagtactttatatgtacagctatccccattttacagatgaaacaagggagtctcggaaagtttaaacaacttgtctgaagccatatgcagccaggaagtgccaaagttgggtttcaaacccaggccaaactatttcagagctctgctcgtcctcaagtcgctgcctgaaccaatgggggaaccttctgcccgggtggggggtgaaccacggacctgccttgcccacggcttcctgaggtcgctctctttgtcttggagaatgtactttactagcaactcccctaaaacggggtattcacaggtgctttgaccaatttcgggggactggccttgcctccaaggagggggccccagatgggactccctcccaaccctcgctctgctaggcctcaaggaggcctcaaccggctcctggctctggccccacggccaaggctgaaccccagcaacccccgggaactcggggtctagccaagcggggacaccacgacttgcacccaccgacccggtccgtcccacttggaaacactcacccgcgggcagaaaaagcgcccgcagctccggcttcgcttccctttgtcccgcgctcgccccgcccctcgcgtccggagcttccgcactcgcactttccacactcttcttaatttttttttttttccgggccccacccgaccctctttagaaaaactaaccttctagtgaagatgcggtgatgcttagcacactcagggatttttttcaggacccattggatcctcaaaactccccgaattttgatactttcccagccgggcgctgattcgtcacggcgaagagggccgaggaggcccgacctaacacagaataggcctgggtttagcggctgtgaggagccggagccgccgcagcgaccgaggaagtggcgggaggtgccgagccttgcggaggggcggtgggggccgcggtgggagacggcggatggcgctcagcgcgaggccgcggaaccactgtggcagcaagcagttcggccagactcccgctgagcccgctcctggaggggccctccccgactccggtcttgctttcctttaggctgtgggtcagagtctacacttcactaaacctgggatggaggcgtggaggacttgcttcgcggcgtttgcgtcctcgcaggcgcctcgcagggcttcctgccctcacggcgggggagtagctttggcgaaaatcagcacgagttctgcagtttttccaagcgcttttagggtgtaatcgtcccaggtttctaagccaaggcccggagagttgaccccctcgcaacagcttgtgtgtccttgcagcgccgcgggtgccacctggtctccgcctcagcgctgcctcggctccttcggttcccaccagcgggaacgaccgtccccactttcagcttaaactcatctgtccttctggatccagctcagaggtctctttgtgatgccctcctggaacttcccccctagtaatccttcctttgtattcccgtggctctttgataataatggttggagtcctgaacccgaccctttgtatcggaccgtgtttgtcatctccagtgctttatgaaggccttgaaagcaaggttcagccgtctgtattggtcatcttcccattgccagtgcctacgaagggcttgacccattcattgttagacgctcagtaagtgtgtattgaggcagccctctgtgccactccagggctctttccactaaatcatgagtatgttggtttaccagatggaatgagtagcctcttctttggatacataaacacccgatggatattgtgggtcactgtggagggagaatgaacgtatgggatccctgacctgtggttactggaaaacagttgacatttagagagaggctgaattcttgggcttcccgtagcccccatcctgagtgtgccaacagggactagaagcatctctagtctgcaaagcgaggaacaagtgatactctgtccaatttttccaatattgttatactcatgaatagagattaatgaaattgaagagcatattcaagagaaagactaaaggagaagtcgtctgccccgtggacaggcagcttgagtggtgcttgagaaaatgtacatgaaattgcttgttaaaaaatattcacgcctgtaatcccagctcttttgggaggccgaggcgggcagattactaggtcaggagatcgagaccatcctggctaacacggtgaaaccccgtccctactaaaaatacaaaaacaaaattagccgggcgtggcggcgggcgcctgtggtcccagctattggggaggctgaggcaggagaatggcgtgaacccgggaggcggagcttgcagtgaacggagatggcgccactgcactccagcctgggcgagagagcgagactctgtctcaaaaaaaaaaaaattatatatatatatatgtatatatccatcagagacatgtaaaggattaaagtacgatacacaaaggcctcagaagggatttcagtacattctttttctggcttcgtccagcaactccagcctggtttcttccctgcctttgggattatggtgggaggattgggcgagtgcagtgctggggaggcgctgtgtgttgtctctaggcagtcctctgaagaaaaactgcaggttttggatgttaagaataaagcaccctatagtaggaaaggggtggcccaaaaacggcaaaaagggaaaggaggggacctaagtggagcagtgacattgtctgatacactttctcactgggtttctgctcagatgtcaccttcttagtaggtgtttcctgacctttttaaaattgcatctcattccccaacccccggtgtctgttcatggcctgtgctttactttttctgtagcacttgtcgctacctaacatactatacttcttatgaatttattttgttttgtctttttcttcttcttttctttttttttttgagacggagtttcgctcttattgcccaggctggagtgcaatggcgcgatcttggctcactacgacctccgtctcccgagttcaagtgattctcctgcctcagcctcccaagtagctgggattacggcatgtgccaccacaccctgctaattttgtatttttagtagagacgaggtttcaccatgttggtcaggctggtcttggactcctgacctcaagtgatccaccgcctcggcctcccaaagtgctggattacaggcatgagccaccgcacccagccgtcttttttttcccatcagggtggagattttgacatctggaacagtacacagcacatttagatgctcaatacttgtggagtaaataaatgaatgactcattttcttcgcttggttctttctctaccaaagatttgaaaaattaagaaacaccagcctggcaacatagggagaccccatctcttaaaaaaaaaattagccaggtgcggtggtgcacatttgtggtctcagttatttgggacgctgaggtgggaggatcgcttgagcctgggaggtcaaggctgcagtgagccatgatcatgccactgcactccaccctgggtgacagaggccctttctaaaaaaaaaaaaaaagaaaagaaagaaggatataggcaagagataatagaaaaataatctgttctctagtcctgaagaaactaaaactgaagagtgaattatccagcaagatggactttacttattatgagtttttttcccccaaagcaaacaccagaacatatgctcttgcctttagaaggatatttatggtaactacaggacagatgtttggagttgtgattattcccagaaaatttgggatacagcatcaatatgactatttaaactaaatataactataagggtagttgggagcactcacgtgggaccagtggttaaccccagagataatcttaggcccaattaagacctaacttaggccttagttttcattctggcagcaagatccagaaacgtggcctgctttcccctctgacactactcatacttttttggggttcttctttccccaagacagggaagccaaaactaagtaagctaaggttctagtccaggtgtctttgagttctttccattgttctgtgggaagaaacgggtgatggagacagagttaggggtaggactgggaagaaaggagaaaaaaggagaaaataagacagaataaggaaaaacctgaagtccttggacacccagtagtccatgaataggctctaagtgatctatgaaccctttaaaattatactcaatttttatgggcttttttcctgataggttaattctttcatgagattttcaaagaggtgcgtgactcaagaaagattatgaaccaaccactgagccatggagtttgtagtatgttcttttgaagcttttataatggattttttttttcttaaacaagggaaagcgagagcaaagctttacttgacccaaatagcctatgaaagtctgattatagacaacatgatgaaacaaactaattttctcagctgtttctgtgagagcagaaggagttatgggtattctgttttctgtagctggaaatagttgtgaaatattgaagtttagcagctttccaggacagagtgatccacactgttttacagaatttaaaaagcacggtttgctttgagaaccctctatgttgccctcaaaataacctggaggatttgggacatgagtgttgccccatggtgtggaaaaggatgaacgttgaaaacagggtagagctggagaatctgggttgtggggtctattatccactgataatattgggagtctagggcacagtagccaaacgagattgttgcaggccgttatctgggctgcctcctgtttttgtaataaacccttatttggacacaagcaccttcatttatttacgtattgtctttggttgcttgtggttacaagggaagggttgtgtagttgttacagggatcctatggcctgaaaagcctaaaatatttgctctctgggcttcgatggaaaaggttgccaagcctggtctagagtctaagcatgtgagggaaacttggaaagccttgtactgattttcacatataccttattttagagcctttatttgtcatatgcccacaaatattggcaatctgtgtgtacatgccggccataacttgtaaacatagaaccaaattctgccctgtggacaaactttcctttgatttcatgtgttgataatttgagtaacgtgtatgcatattgtttaactaaaatttaattttggctcatgtatcataatacatttccaatggaaactttcaaattaatgtaagcattttttgacttcagagattttttatttttgagacagggtctcactctgttgcctaaagctggagtgcagtggtgcaatctaggctcactgcagtcttgacctcctgggttcaggcaattctcccacctcagcttcctgagtagctcagactacaggtgcacactaccacactgggttaagtttttgattttttttttttttggtaaagacgagggctcactgtgttgcccaggctggtctcaaactcctgggctcaagcgatcctcctgcctcagcctccctaagtgttgagattacaggtgtgagccaccatgcccggccaacagatttttaaaaaattctaaaaacgtaagaaaacaaattgaaggacaaactgaactttgccaatacaaagatctctagcaaatgaataagaaatatgcttatgtgcagtattagttgtatatttctgcataacaaattatcccaaaatttagtggctcaaaataataatcacttattatctttagagaactatttttttttttttttgagacacagggtctcactctgtcacccaggctggagttcggtggcatgatcttggctcactgtatcttccacctcctgggctcaaacaattcttccacttcagcatcctgaatagttgggactactggtgtgtcaccatattcggttaatttaaaattttttaatagagacgaggcctcactgtattgcccaggctgggcttgaactcctgagctctagcaatccttctgcctaggcctctcaaagtgttgggattataggtgtgagccactgtgcctggcatagagaacatttttatactttagacactgtgcttggcatagagaacattttttgtactttaaaagctatcatgacagaacagttcaaattgggtgactcactgggaaagaataactgttctggaagcaattgaaaaattaaaaatagtatctttacctgttgtgttttgaactattaatcattgtccgctgtaatttcccccacacattctttaaagacaattttcttccaaatagtactgtatatctgagcagtgctttaacaaatatttttgcttgtatattatttcaaacaactgtaaggtaggtagagtaggaattattatccagctttaccttttcctttgttttcaagtgtaaaacttgaggcctaggaacttaaagtggcccctcctggttacatggttagtgacagagccagggttaggatcctacaattgttagtaactggaattactctttatttttgtatttttttatggaagcatgcatttgaaacatttcagagagattaaagaatattaatttctactcatgtgtaaagcaaggataatattattcattttgtaggattgttgtaaggaaggattagggattattagggataaacacagtgcctagagctgagtaagtgctttgcaaatggtgctgccattattaaactttttccagaactatgggattatgtgattattttgatttttaaaaaactagaataaaatattgatataccattcttaactcttttgtaaaacaagttaaaaaccattatctatctactgtgattgcagttttctttattccccaaatgaactaaccatactggagtaattagttctttgtttcacttaaccatgcagagatatttttgaactaaaaggactgcgttcaaactcacatacaatgcagctttagcattcatatttcaattttttcaatttttaatttttatttatttttactttttagagagatggggtcttgctatattgcccaggctggccttgaactcctgggctcaagcagtcctcccacgttggcctcccaaagtgctgggattacaggcatgagccaccgtgcctggccatgtttcatttttttaattgtagtggaatcattaccttggtaaattcatatcccaatttaaaatgccccaaagcaaataaagcttcattataaattcaaatactgtattttaaaatctacatgttatacacccaatagatgcatactggaattgctacaacaagcagttacattcatgacgaccagtactaagttttttttaacactgcaatagattatgctagatatattgctttattatgatcactgttgcttagtacagtaactttagtacaatagcttatatgattgcatttttaaagctttaataaagttagtagcatttagcaatatcaaatgaaacattttttatgtataggatgtattttaggtcagatgcttatgcaagaataagcacttaacatgctgttatatccttgacaaaacaaaatcatcccttttcactaaatagaataaaccagactaaaaggaatctgaagtaattgaaagaaaattaaaaattttatatccctgtattatgttaaagattatttaacataatattttcctggttaaaacatacatttttctggttgaaatatatatatacatatatataaattatatatatgtatatatataataagtatatatggagagagagatagaggagaagagagaggagagagagagagaaatattttaaaggctgtactaaaatgctaacgtagctatagcccttagatgatactttagctgggaaaaagtatggtgagttgtactcagctactttttctgcttagaaaagaattaagaacttataaatttctaatgtcttaaaacaggtatttattaagatcttaaatatacctgtattaaacaaattaggttattttaaaaactttgcaacaatacctcacttattcacaaatatattttctacccatatttattacaatttgaacgatttaaaaacaaatcctctaaatactcttagcttagataacaataccgttatcttagttcacataaatgattgcaagaaatatttataatacttcatatagtatcttatctacggcttatagcaaacaatctaatcacatttagctttacagttggaaaaactgggatggtgggtaactgttctgataactatagtaactaccttttcaatttgcttttcatgttttgtttgcgcagttggccttctgattttttttctttttttggtgggggatacaacctttaaagttccttgagtaaagtaaatcttccggaaatcagatacttattacaaaaaaaaccttttagatatatgtagattaacttaattgtacttatctcaaattagccctggggtgtgttctatagtttgctcagaatttctcatggaaaataactcatttttctcagtatacaaatgatttatctcaaaaagaagaatcctcattaggtgaatagtgagtccccctttaaaaacttgtttataattgctctttttgaaaaatagaacaaacattgtaggtttaaccagtcatggaataatggtgaataactcagtgtgactcttaacacaatcctattcaaacaattcttttttccttagcgtattcagccattgaaaaaaattacaaagactttactaaaccaggttaatgcttacagtctctgatgaagtttcaagggaaaaagaagactattgggagaatataaagaaagagactgtactggatttgtgattttatttttaagctactccctctcattcatatatatatatatatgtctatctccataattagattcagagaaatgtcctttattgtttttttcttctgaagagaaccacatattgatcataacattttccatacatacgtaataacttacattttgggacagagggagttggtatggcccaccttggtccatcctaacattttccaatcaagtcaaatactatctttggattaattagctgttgatggaggtttgatagagggaatactgcatgatcttctcatgataagcctgacttctatatctggtagattatcctgcttagtctctaaacacccttcatcagtggctgctaaatgaagatcaaatcgaagagaaacagactttttcctcaatcgagggttatctttaaagaaagaaccttcccattctttaataacttcatccactttctctgtcctgaaatgataaaataaaccttttaataatgaagaagtatgggtctattaaaaatatgtattatatatttcatatctatggaaaaatcaagaaatttgtataatttatagtgtatagaatttataatgtacatactttaaaaatcatatgaatagaatttcaaaggaattgtatggaatttctctttaggaattctcatgtttgggttgtatttttggaaaaaaacggcaaagtaaggattcagtactcttccatgagtttttatgtatatatgtcagattaaaaatcacagtataggctgggtgtggtggctcatgcctgtaatcccagcaatttgggaggctgaggtgggcagatcatgaggtcaggagaatgagacaagcctggccaacatggtaaaaccccatctctactaaaaatacaaagaaaaacccagctgagtgtggtggcgcgcacctgtagtcccagctacgtgggaggctgaggcagaagaattgcttgaacccgggaggtggaggttgcagtgagccaagatcgcgccactgcactccaccctggcgacagagcaagactcaatctcaaaaaaaaaaaaaaaaatcacagtatactaaaactatgtttggaaacatttaaacaaagaagagtaattactgggattacgcaaagttaatttctttacatatatttattattatttcttagtcaaagtttctttacttactgaatagtgccatgagcttcagtgctctccttaacgatactcccatttaagattgcctgtttggttactgtttctacattttcattctcatacttttgtgggacttttgtagtaaaagatatttcatttataatggctgtgaaaatatcatttatgatatattaaattacagtattgaattactgttcacaaattatattcaaacttttattcaaatattgcttgttttttttcgactttaaagtatttaatttccttataaagtaatccctgtaaatagtacatcacttttcaaatgagtttatttatgtcagaaactcacctgatggtaaaacaaaaccaactctacttgtggtaggctttttgtcttttttcccaccttggatacaaccataatatctgaaatcagaaagaattttattttaagagcaacactgtatcagcaaataattaaaacaaacaggagaatggataaatcgtatattcacgcaatagaaacactatttaactgaaaagaaatgaactaaggcttcaccgtatctttatggattgatcccctaagaataatattgagtgaaaaaagaagttttatagttttataaagtttagaataatatgcaaaacaatttcatactttgtaggaatacatacatattaccataaataaatgtatgggactaataagcatcaaattcagaagccaggtcaggtagagggaggagcatgagattagggtatgtggcttaggtgtccagggaacttcaacaacattggaaacattttactcttttttttttttttggaactatttttcttcttaaactgggggaagtgggtacagaggtggtcattatatttttttgaaattttcttgtatatctcaagtgtagcctaatttttttaaagttttactatgcaaatattaaagactttgatcaatatcttgaatgattaggaattaaataaaattcacaaccattcattttatttaacaattatatagttacatgtatataggaactggaatgattaggaattaaaatttataaccatttaactatatagttacatatatacatatacatatgtatatacatgatatgtatacacacacatttacatagaacttacaatgtgccaggtattgttttaagcactttacaaacattaactcatttaatcctcacagcaatcctatgaggtaggtagtagtattattcccattttacagatgagaaaactgaggcacacagaggttaagtaacttgcccaaggtcactcagctagtaagtggtatatttttgattcagtttatgttttttcaaagatttaataaatgtcaagatttattataggctaaagttgtttcacctagttttcatctagttttatagaggacttagaatttggaagcaagcaagaataaagattttttcatggagaattggaggttatgtcatgctcaaagcaatatgaccttataagtcattacagattatgatgtatgaattaacaagaattcctcttttgatatcttttcctatcaggatatctggtagtcttttaaatcatgactcaaaataatattgctttccgtggttgtaatataattacgttagagtaatgattactgttttgaggtttgatgtgtggtatagggtgagcccttgatcagggggattgtggtgattgtgaattttccaggcttttgttatgggtgatccttagaaggcacagactaatcctagaagagatgaatggcaaggaaagtgagaaagttaggaaaggtctctctctctctctctcttttttttttttttttgaggtggagtctcactctgtcgcctgggctggagtgcagtggcgcagtctcggctcactgcaacctgcctctcctggattcaggcgagtctcctgtctcagcctcccgagtagctgggattacaggcatgcaccaccatgcccggctaatttttgtattattattattgtttttttcttttagtagagacagggtttcgccatgttggccaggcggatcttgaactcctgacctcaggtgatccgcccacctcagcctcccgaagtgctgagattacaggcgtgagccgctgcacccagctcaggaaaggtctttttcatgattagctcattgtaatcccaaactccttaagcaatcctcctaccttagcctcccaagtagctgggactacaggtgtgtgccaccatgctcagcgaattttaaaattttttgtacagatgaggtctcactatattgcccaagctggtattgagctcctgagctgtagtaatcctcctgcctcagcctcccaaagtgctgggattacagcagtgagccactgcagctggccaagactacaagatcatttttgtagtaatctagaattgtttacattttgttctaggtgactttggctgtttggttcctaattttggaagactagaaatggttctttcatatattctttgcagtgcataccttattgtatgggctcagtgagtacaccatgatgatgatggggtttttggatttaatttctctgactacatcaacaatggcataagtggctctgtatttctggccccttgtcattaactaaatggatttaggtacctgatttcttctttttctaggaggtggcgataagttgctatttcttgttccagcctcatcttcgtgttgagaagcatctcgtgctcttgaagctgcttttcgatgccgcgccttacttcctgtagctctttttctagtccttcaatcacagtctctaggtcttgcagctgcatctggtaatgctgctcgctggcatgtagggagttttcaaggcccctttcctgttttatatagattttcatcagtgaatcagtaacacagaatgtgtttctgaaatctgatttgcaatatcttcatcttttttttttttttgagatggagtctcaccctgttgcccagagtgtagtgcaatgccatgatctcggttcactggaaactccacctcctgggctcaatgattctcctccctcagcctcccaagtagctgggattacagtcgcgtgccaccacgcccggctaattttttgtatctttagtagaggcggggtttcatcatgttggccaggctggtctcaaactcctgaccctgtgatccgcccgccttggcctcccaaagtgctgggatgacaggcttgagccaccgcgcctggctgtcttcattctatgttctatttttttctttaaaaagattgcaataattttattatacctatgcaagaggtgtgtttccttacagctttgtgtgacccctaattattaaaaaattatattttatttacataactagagatcttactctatttcaaagacatcctgtgataattcttactgaaaaaaaaatcctctgcagtgtgattaacttattatcactctgaattatctgatttttaaattattgaaagtatacttcagaggtaggctttgtaaaaaaaaaaaaaaaaaagaaaatatagtacattgagtatcaaggccagagcagactgctcataaaaggcatttaggaacatgcttaaatactttttgtttgtttgtttgtttgagacagtctcgctctgtcgctcatgctggagtgcagtggcatgatctcagcttactgcagcctctgcctcctgggttcaagtgattctcgtgcctcagcctccagagtagctgggattacaggcgtgtgccaccatacctggctaattttttgtatttttaggagagatgttttcgccatgttgctcaggctggcttcaaactcctggcctcaagccttggccttccaaagtgctaggattacaggcgtgagcaactgtgccttgctccaaacatgcttaaatatttttctttctttttttttttccttttcttttctggagacagagtctcgctctgtcacccaggctggagtgcagtggcatgatcttggcttactgcaacctctgcctcccaggttcaagtaatttttgtgcctcagcctcctaagttgctgggacaacaggcgcgtgccaccatgcctggctaatattttgtatttaatagagatggggtttcatcatgttgctcaggctggtctcaaactcctgagctcaggcaatcagcccacctcagcctcccaaagtgctgggattacaggggtaagccacagtgtcagcctaaatattttttattcgacgtctcaatggcatggataaaagaatctccactgttaagactttggataataacgaatgctctattccctatcttcagcaactagaaaatcccaaggtaataagaaaggatttcttcatttttacaggtctgaactaaaccttgagtgagttggtaacagccactgccacaatggagggaggggtgagtaattaaactaggatcagggatagaattcagtggccttgatttccagtttctcatggtaaataaacagacattcatcttttccttctcttaatcaaatcacatctgaggactcgatgggtcggttacttttgggatcattctcaccacagcatggagagattcaatttccacttgcaggtggtgccactggcgtcgggcctccttgagttctgcttgagctgccttcaaagcctcttcatctttgtccatttttttgcttatgtcttcttctagctaacaagaaagccaacagcaacaataacaaacaaaaaacaaggagtgcttctgaaaatgagatgtgtaaaagcaattatagaaaaattgtataggaatcaaagcatttttccttaactcattagattataatgtgtgtcctagtgcctagttaactaattaaatatgtaagtccattgcgttcttagcccgttttctcctatgttaaatgatttcaagaaatcccttccaactatgacaatctgtgaaatatggaaaaatacatttacatgaatgaaaacagtttgcaggaccaagattcgtgatctctgatttttaacttttcattatttatggatcactaggaggaaggattgaaaattagctatttccccccacattttcttgtaggctgctttgcagaagcagataaacagccgtacccccaaaactgatcaattctgggaccaggtatagggatagggcgtaaatactgctaggaaatacattactagtaatttagagaattaagttgttataggcaataaggctcacaaatagacttccatattaagaaaatctgttgattgacctttttcaagatgatctttttaaaaggcatattaattttgggtatctgggtaataaaatgaataaataataaaaatgacttctctaaggattgttttctaaatattctcctattaaaaaagtagaatattttatatttagctttaaatgtttttatgttgatgttgaaatgaaaagaaagtatctgttgacagaatttttaacatttggccccaggaacagtgagaacaatgtatagaattgattgtagcattttgaagcaaaatttataacttttaattttcttataaaaatatattttaacatttaaaaatttaattttatcatacattagatttttttaaaaaaacgttgaagtaaatgaaagtttatgaataaagtttagggcaaggtattggagaacaaaattcgtacatttcttttggtttgttgaaaatctgttcttagtgttaacttggcaaagtcaggcagcaagcaacacctaccagagcaactacagaaggtaaagtaaggaattttggagagaagaaaacagaaaaatgctggtatctgctggtcttgtggctttcaaatatggaactggcagctaagcttgttcggtaactacagtcccaagatggcccctaaagaagtctatctcccaagatgagtcctagggtgatccccttctacattgactctgggctgacctgggtcttgctttaaccagtagaatgaggcagaaggaatgctgtgccacttctagacctaagtcttaggaagcctgatagcttccacttctatgcttttgggagccttgggccaatatgcaagaagtctggataccctgctggagagatcctgtagaaaggccagatggagagagaccctgaggctacgtgaagtgagagagaaagtcccagcagagccagcctttcggcaatgccctgccaaagtgccagacacataagtgagcccagtcatgccccaagacgattgaggtcccagatgagttttggggtgttatacaacaatctgtaactaaaatagcttatttagaaatttaaaaaaataactaatcaggctgtcttgaatttatttcagctgactttctgagttatttggaagaaaatcctctaaagtagtttcaaattaaaagacactttaaacaaaactcaccgtagtcttgctttttcatttgaatttactcattttggccctgtgacttgtaaactaaactcatatttctactactgcaaagttaagtgttttgtttatgatttttagaagttgtcatctattgatttttttcttctgtttgtaaaggtgaatgaactatcccaatgcttacctgtaccagtgactttgcttaatctaagatgttgatcattctttatgaaggctgaaaatgttatctagaggtgaaatttacaatggaactaaaaatgagtggctaatggaataaaggcctgacatttttctaccaatttttttttttaaaattttgggtgatattcttaagtaaactttttgctgtatttcagggtttggaagataacttgaacccatatatgataggtaaactaaaaaatcccctaaatttcttaatctttgtttctaaaatatttgtttgtaaatttgtttaaagacttgagaccttaattacttgctgaaggtgattgttactttaaaactaagtctatgaaattaggatttagtccttatctaagtaggctctctttctcttttttaaatacttaaatattacaagctttgtaatggaaagaaatgtttctcatcttatagtacagaagcaaaaatcttagtggagaatcgttaccaatttggggaatttcaatggtcataatttatatcattgtttctgaatgccatgttcacacactcagatgatttctatttataacaatctggtataaaatggaactcgttaaaaagatgatagaaaccttttagaaatatctctagaaagtgtacatgctaataaatcttacttaaagatttttcattttaaagatgttatttaaattatctctgtaaataactccaataatatctttgaagggtatttggaatggttccttcctgaagattgtaagaggttagagtgcaccattttatggtatgttgaccccatgttaatgataggaacctcacaatttatataaaaatcaaatgcatcaatcaacacttacttaatggcaatttaacaatataatcacagtatttccccctgtagtcccagtcacactgcagtagaagctaaattccttccccaatagatgctgcatcgaaaaggaaatactgtacctcagagaggccgggacaggaattgggtagacatggactgtctccttattctggaaggtgcctgtctgtatgaaatcattacctggatccttgttgagagcaccgtctctatctgatttctggtgaggatcttttcatagtttgccctgatctcattgagtagctgggacagttccattcttttcccatcctccaccttggctaactgaaccttatcgataggatgagtcgctgcggcagtctgctcggtctgcgcggaaggcagggagcctcgcagagttttaaagatgcagagctcctttttcggaggccacggaaattctcatctttctaactaattatgcaaatacagggtaaactctttgctcctattgttattggtatagtagaaatgtcagattcttcatgaaggaaaggaaaatttcaaaaacctgtactggttccctgtaaaaattgagcactttgaggggagggggagttcatttttgtgaaaaggaaatggggcataacataagaaaattgccgggcatggtggctcatgcctgtaatcccagcactttaggaggttgaggtgggtggatcacctgaggtcgggagttcgagatcagcctggccaacatgatgaaaccctgtctttactaaaaatacaaaaattagctgggcgtggtggtgggtgcctgtaatcccagctactcgggaggctgaggcaggagaattgcttgaacccaggaggtggaggttgcagtgagccgagattgagccactgcactccagcctgggtgacagagtgagactccatctccaaaaaaaaaaaaaaaaaaaaaaaagaaaattatatttagttttctcaaaatgttgcagataagtgctggtagactatgagagttgtgagttaacatttccaaagttttaacaaggatgaagaaatagaccttttggtgtattcaccaaaagaacccttgagtcctttggagggtgtagtcagtgtaccattccatccaatcgttgcaatcacttgagcccttcggagggtgtatttggcgtatcattccatccaatccttgcaatccctgacattttctaacctgtaaagatgaaaagactgaggccagagaggttgaggcatcttgcccaaggttgctcagtgatgtatgacatcactgggactggctctttgacaacttgcttgtgttccatgtattacccctgcatatctgcctctgcgttctctctctccccttctaaattcctggtttaatcttgccagctggttgctagatgtgacagaaatatgtcgtgagagtggatctatcattattgttatttgtggagtggctttggctgaattgtatctggagcacagttcaggagataatcagacctgggttctagcccttacagggcctttgcatgcatgtcctgctcttttaatttctgaattaactcacatctggccaggccagtctatgctgggcattctcacagccctctccaaacaaagctgtcctacccacagctcctggtgagaggagaggttccaggttatttctgacccacccctccctacctcctgcaccttccccatcagtcacaacttgattatctatagattggtcagagacctttggagtaggctgagacagaaagctctgactaaagagagtcattaatgattatctaggccaaactgattctctttcttggtaactgggactgagaaatatgaagagaattaggcttgggagtggaggagagagaagaaagcaatgaattaaattcctaaattaaattcagggagcaatgaattaaatgcttcctgctactttaggtagctcctgctaatatccgcctgaaacacagagagctgaactagattccctggagggtcagtcctggcaatctgcattttaaataggtctgccagcatttcttatgcaccctaaataaagcagcactgtccagtggaaatataacacaaaccacaaatgcaaaccacagatgtccttccaaactttctagtagccatatcaaaagattgaaacaaaaagaagtgaaattaattttacgactatattttatttaacttgatatatccaaaatgcagcaacccatataaaatgttaatgagatcttttacattattcttgatactgtctttgaaatccaagtgtattttatacttacatcgcatctcagcttggaacagccacatttaaagtgctcaatagctgggcacagtggctcacccctgtaatcccagcactttgggaggctgaggcgggaggatggcttgagctcaggagttcaagacaagcctgggcaacatagagagacccagactctacaaaaaaaaaaaattaaaaaattagccaggagtagtggtgcaagcctgtagtcccacctacttgggaggctgaggtgggaggatcacttgagcctgggaagattgaggctgcagtaagccagatcacaccactgcactccagcctgggcaacagaatgggaccctgtgtcaataatttgagacataataataaatatttatttattgagacagacagaggggataggatttagaaaggtattttacaggcatgtgagtaatgcagtaaactatttctagatctcaaattttatttttcaaggaaaaaatattattactttcctttacaaaaatactaccctttatttaaataaaacagtaacaatacctcattaaaggctatggcatatataaaattgtggggtccctacaattcttggtgcatggactgagattatgatggagattgtcataaatccattatagttattagaaaagtaaataatttaaaaatgttgactttattaaaaggagaaagcttgttataacacatctcacaaatgccaaaatactgtgtttggggaccctggctccagggacattcgtgtgtctgtgtgtctgcacactgaaatcacttctggaactttaaaaaatggtgatgactgtgtcctcctcccagaaaatctgatttaattggctcaggacggggcctgggcatcagaatttttgaaaacttcccaggagtctaatatgtagcaaagtttgagagccattctgataaatgtaagttttcttccactcatttatccctctctcttcagccagaggaaacgagttgttggtacaatcatctgaagttaagattcctgcagttaaatattggcaagtagttcatgctgcagctatcacaactctgggtgcataggctcaggcagaccttattgctttatttttcttttttcatgttaatctttattttgagttcctattctatggaggatgtgtgttaaatctcatcatctcagtctctcgccttttctccaaagcattgcatctaagttttaggggagcttatatagttgtgacctggggcggggagcatattgtccttagtgtcatctgtccaagctgtgttcactgagacagtcattattcttcccatctgtcccattatcgttggttggagacatataactaaaaacaaaaatcttccctcaacccagaaatcctctccacaaaggtagtacggaaagaaaatacttctattactgaataagcactaaactagaatgtgatgtgcatcacaggtaatcttctaggaaattgcaagatggaaggaaatctcacctgttacatagccaagcagcagatacaacctattacatactttttgtttttttttttgagatggagtctagctctgtcgcccaggctggagtgcaatggcgcgatctcagctcactgcaacctctggctcccaggctcaaccaagtctcctgcctcagcctcccgagtagctgggattacaggcgcacaccacaatgctcagctaatttttgtattttagtagagacagagtttcaccatgttggccaggctgtcctgacctcaggcaatccacccaccttggcctcccaacgtactggcattacaggcatgaaccaccgtgcccgacctacatacatattttcaagataaacaatagttaagttagagtaagaggacttgacagtaccatagttacacatcgttcatcttaacttcacctggtaatttggggtgatcatctgtgtcagctacttggctttctccagaggaaaaacaaaactttttatatctttatgacaggtggtagttttgcaactttgagtaaggtacccacagaagttaggctcctaccctcccacagaaactgggatataggggtgtcatctcttttgatgtttacatttcaaagagatggctcccaggtacttgagaaatacatccctggatcataaagctaatgaaaggcctatctaggcttcaaaaggatttacataaatttcaaagagaggaaacagtacatataagttttcaaaagttataattacaaataaatgctccctgattttaaattatatttggaagctatagcaatcaaaacagcatggtactggcataaaaacagaaacatagaccagttaaacagagtatagagcccagaaataaatctaaacctaatttaattaactacattttggcaagggcctcaagaggacccaatggggaaaaaatagtctcttcaataaatggtactgggaaaactggatttccacatgcaaaaaaatgaaattggacccttatcttacaccatattagaaaatccactcaaaatggataaaagatctaaatgtaagacctgaagccattaaactcctagaggataagagagggtaaaagctccttgacattggccttggtaatgatgttttggatattacaccaaaagcccaggctacaaaagcaaaaataaataagtgggactacatcaaaataaaaagcttctgtacagcagaggaagcaattaacacaatgaaaaggcaatgtacaggctgggaatagatatttgcaaactgcatatctagtaaggggttaatatccaaaatttataaagaactcttacaactgaatagcagaaaaacaaataaaccagttaaaaaatgagcaaaggatctaaacagatatttctccaaagaagacataaaaatgggcaacagatccatgaagaggtgtttaacatcactaaccatcagggaaatgcaaatcaaaattgctatgagatatcaccttacacctgttaggattggtgttatcaaaaagatgagagtgacaaatgttggcaaaggtgtggagcaaagaaacagtacactgttggtgggaatggagattggtgcagccattagcaaaaagtgcatggaggtttctaaagaagtcaaaaacagaacttccaggccaggtgcgctggctcatgcctgtaatcccagcactttgggaggccgaggcaggtggatcatttgagatcaggagttcgagaccagccgggccaaagtggtgaaaccccgtctctactaaaaatacaaaaattagccgggcgtggtggtgggcacctgtagtcccagctacttgggaggctgaggcaggagaatcacttgaactctggaggccagggttgcagtgagccaagatcacgccactgcactccagcctgggcaacagagtgagactccatctcaaaaaaaaaaaaaaaaaaaaaagaaaagaaaaagaacttccctatgacccagcaattccccttctgggtatccacccaaaggagatgcaaacaccaccttgtaaagatatctgcacttttatgttcattgtagcattattcgcaatagccaagatatggaaactacctaagtgtcaatgaatgaatggataaataaactggtgagtgtgtgtgtgtgtgtgtgtgtgtgtgtgtatatatatatatatatgcacaatagactattattctaccctaaaaaaggagatcttgacatttgtcacaacataaatggacctggaggacactatgttaagtgaagtaagaaagacacagaaagataaatattacatgcactcatttatatgtggaatctaagaaaaaaaagtcaaatatgcagagaataaaacagtggttaccaggagtgggggtgggatgggttaggaaatggggagatggaagtcaatgtatacaaaggaggagatatgtaggatgaacaagtctagagatctaacctattaaccaggactagagctaataaaattgtatgctaactgggtttttttttttttaatgtaagtagactttagctgctctcatcacacacaataaggtaactgtgagatgatagatatgttaatttgcttcaccagggtaaccattttactatgtatatgtatcccataacattgtgttgtaaaccttaaatatacacaatacaatttattttttataaaagatgaagtaaatgctcaaagaaaatttaggaagagagaaaaatctcttcccttgtttccaacagtgagaatcaagcctcttattttaaatttgcttcatcctagcagtgtccagctgctctctcccatatttctttccatgcttaagggcgtaagagtcattctgatgcttctgtgtgcctgtggcatggaaatatcaggtggactgtggctccatctgcccggacacactgtgcagccataacctatttggctcttgtccctttcctgaggttacaatccaggaagtaaggcacagttctcctaaatagttcccccaacttacctcccgttttgctgctttgtaggggctctgactcagaagcaggacctggggctcccctctcagggaccccgctttgcccttcctcagcaatcctttttttcttccctctcctttcagtccaaggtaagttctattcttgagggtgggacggaaaatcctgcttttactactggaacctaagctccaagacctgtctgctcactgctggatcaccactttctagctctgtgcctagcacagagaaggcaggcaataaacaagcgccaaatgaataacgtttctttaggacattttgtgtgggccctgagtcctcttcattctaagactagactgaaggaacacattgcttttgtttcatcctcccctgagacaatgagcacagattaatttatttgcctgaagaaggtaaaggaaatgaattaccagaaggatggtaagtggctcaaaaacactatagtccccaaatttgtagtgtttacaaacacaagcaaatcagacaggcacccatcattcatcttggtgaatttttatggagtgatttcctgggagtttggaattaaactctgggagaaataacatcttttctaacctgtttgtccttaacaaatgtggcacactcaagaatttgagttttgctttgaagaggaaaaaatattaaaaaggaaaataatggattatttttatgtaatgcatttgggcacatacatttcaccctgtaaatcaatcttgtacacaaggatgtcaaactcaagccatttaatgtttttcctgtcctgcacataaatgttgtgatctgtttttattctaaaaagtataaaagatagaatgatggcaatgtaagtttatattaagtgtttttttccttccaggaagttgtaaatatgaatctgttttcttcagctagacagaacactccaattgatcttttataatcccaaagagcttgggtattattttatttatgaagcataatttctttagcagcttaggattttgtgactccctcttcttaatcaagcatgcattttcataggattataaaggcataattagtcagcaaataaaggcttttttttaaaacttaaaaaattgctataaatgacagggctttactggcttatatcctttttgttatattattgatttttctactcataggagcaggcctctacgtgatatcatttaatcttttgttttatatataagttaagactataattagacgataaagagttttgtgtgggaatatgtttgtcagcattttttagcatgttttcagagtatgtgagagatgcttacatgcctttctatacacactgaacatgcatttcacatgaactgattaagcagagtacattatacatgcaatcttagtcctggcagatgctcacttcattctttgctgctgtaactcaagggcaaaaagcagggcagttttgccaatcaaggactttgccattgggtcctattttctctggcatcttccagatacttccaggtgcttctccttcttaccttgttttttgaggcccaatacacacagatggtcaaaatgagctttactagatagagggtgagctcattttagaacacccagtttatacaattttggtgtattacaattcatgatttttttctagcttagcagactataggcatcttccaaaactattcagaattttctccattccttttttatctggagtgcgttaagtcccaatctttgaagtcatagttgtaggttgaaactgtgctcccatctactcacttgagctacaatatttacgtctcctttcaaatctctagaagggaggtctttgttgggttctaagtacattgtcttcaccaatttgacaggtgttcccttagctcttcctgtctttgaaatattgatttttctaaacctgctttctataacttacgacattggccctgctgtcttctattctgtgtcctgatactctagtcttagtcatttctctgcatcttagtttattctagacaatttatttccttgcacttgcatttatcctttcttgcttttttttttcttttttttttttttttccgtagatggagtcttgctctgtcgcccaggctggatggagtgcagtggtgtgatcttggttcactgcaacctctgtctcctgggttcaagtgattctcctgcctcagcctcccgagtagttgggactacaggtgcccgccaccatgcccaggtaatttttgtatttttagtagagatggggttttgccatgttggccaggctggtctcaaactcctgacctcaggtgatctgccaccttggtctcctaaagtgctgggattacaggcgtgagccactgcgcctggcctcttgaattttccctctgttgtcttttctctttttgaaaatttttattttgtttaaaaaaatttctacttaggtcattctcacaggctttctgccctgcatatcaatttttagcaccctgacagtattccctggaccctcaccccttaacattgcccaaatcttcccaggaatgcagctgtgagctttcttctcctcagcccagactgtacagcattctggactttatgatgttccatagccattattcagtggtttataaacacatgtttttagtcattcaaaagcctttttcatttttagctaaacttttgaggtaactgtggattcagttactgtaagaaacagtacagagcaatcccacatatcctttactgaatttccccgatggcaacagcttgtaaaactagaggaccatatcacaaccagggtattcacaccaatgcagtcaagatacagaacatttccattgcaacaatgagctcaaggaagggctttctctcaacgttggctctggctcacggtccctcgcaccatgaaggacacagaaggaaccagaccctgaccctgccgcactgctccaattcagggtagaattgcgaagtgccacaagtaaggcatctctgaagaggaagtaattgccttttttttttttttcctgaggggatcagagaaggcaaataaaggcaaacataaattaaaaataagagacttaattcttcctgttaaaaataagggaaaagacacccctgtactcccctttcttcgagcatttactttagaaaacttgtaaattctttcgctgtctctttgaaatgtgagtaaatcttttaaaaagtaaaataaatcttttgccaactttacaaccaaggaatgcctttctcaagactgggaatcaagccttttgagcgtgaccatccaaggaaataaacacccctgtgtcccaggttctgtgggagggcaggacctaatttcggcaggcaccttgctccaaagctacctcctattataaagatgtgagaagtttactttccctgtatataaagcctattaactaacatagatggtcacccaaattatgggtaaagttaggataaaccgtgtgtgacatatggtgctgtgaagtcctcttatgtgaagagtagctgttgttcatcctgagaacatccacgtaatgggctgtgtctgcttggctatataaaggaagagctatctttctgtctttgcagtctcttagtggattgcttgtgacgggcatcacattctgttttaacgcttattcaatagtaaaatgattttctttctcgtttaccttggtggagaggatttctaggttaggagatttttttactattttttattttttttgagacggagtctcactctgtctcccaggctggagtgcagtggtgcgatcttggctcactgcaacctccgcctcttgggttcaagcgattctcctgcctcagcctcctgagtagctgggactacaggggcccaccatcacacccgactaattttcttttcttttcttttctttttttttttgagacggagtctcgctctgtcgcccaggctggagtgcagtggcgcaatctcggctcactgcaagctctgcctcccaggttcacgccattctcccgcctcagcctcccgagtagctgggactacaggcgcccgccaccacgcctaatttttgtatttttagtagagacggggtttcaccatgttggccagactggatattttgtttttaattgtatttccatagcagatttcatggaggaggtagcgtctgaccttggctatgaaggatgctgcatacatatgttataggcaatttattttaagatatgtaacatttctcatttgtagtttaacccacacatgggaccctgttttagacaggtggcagggggtctgcctggaaattaattttaaaaaatccaagtgaaattcacgcaacgtaaaattaaccattaaaaaatgtacagttcattggcatttagtacactcaccatgttgtgtaactaacacctctgtgtagcttcaagctattttcatcacccccaaagaaaacccaacccatgaagcaatcatttcctatcctcccattcccccagccccttcaaaccaccaatttgctctctgtggatagcagcactattcatcatagccaaaagggggaagcaacccaagtttccatcaatgggtaaatggacaagcaaatatgtgctacgtacatacaatgcaatgttattaagccataatagggagtaaagtactgatgcatcctaaaaggtggacaaaccttgaaaacattacactaaatgcaagccggaccccaaaggtcacgtcttatatacttctacttatatgaaatatccagaataggtaaaaaaaaaattgttttttggagggtacattttagcacatttgggaagacatttatatggtagactttgaacccttatgggggatggtgtggagtgttttctgggaaacagaattagtaaagtggaagaggcaggaaatagaaaacttaaggggtggccgatgacagaggaagcaagagtttacagaaatccctcctcctggctttcaacgcccaccctacctgagcaagcttgtgtctcagtgtgaagtttctctgacaacagggactggtccctgtccagtcttggatatatgccctgcacaactcttgtaatagtaacagtctagtcctcagaatcaaacatttagtttaactttacgtgtttgaaatgccttgaatgcaggaccccgctttagttttccattttcacccactctggtagcctccctagaaagactgcgtggacagcttgaggacacctgtgcagatcatgatcaaagggaccacgtagttctagtttttaaataaagttcacgtatctttttgtattatttttgctaattatttgcctttacccaacggcttgaatgattgaactctattttcaggcttaaatattccctctgcactgctgcaactggccggataaatgtgcctactccagcagcaagctctccacatcccgtccccctttctgtctcctccttacttcatgcccccactgcctccttagttttcagctgccagtgcaaagcaccccagctttctctaggctgtgctctgctccctgacagctgctgttctctccccatccctctcttcttcccttgctttcaacttcccagccagtctgagtatttgagcaccttccagctgcttcactgttgtgtcatgccgggggccatgttgcacagccgcggcacacatgtatatccacggggactcctttctgagcctactgggtgcatagaaactggtgttccagaagtgtacagttgagtttttgacaaagagaaattttacaaacaaaattgtggctgtacaaatttttttttaaaattatattttcccattggcttcacagaagagatagcacctgaccttggctattaaatgcacagtatttaaaatatatggattaacaaaattttatttgctcacacctttaagtggggttaaatatacttggtaattgttttcttcttaaccagattgtccttaagggcaaagagtgcgtgtcttacatttctttaaaatttgccccatttccgtcgtcccaccagccccttagacttagtgcttaatgtttttaaacaaacaaatgaatattaaagtaggcaatcttttattgactttgtatcttgtcttgaaaaggagttgattactgttaaaattctcttaaaaatatgttttgagttctgggaatatacattgcaaggttcaagtttgttttgactttctaattgtataattagagaggagtagctcactcaggaattactgttgtgaatgataagcttttcctcttggatgtgaggttgtgttcagattaaagacactaatatggtataccagcaattacacagtttaaggcaactaagttacatctatagaccatatcattttacatgaatataatacttctatttccataaataattccgaatgcttggagaaaacactagtttttattccccaaaatcattgtctttgaaacctccttaaatagccataagactagcaactcatgccttgaaaaaggtagtcactgatatcaacactgtttgagaattggaaaaacatttccaggacaagcacagtggctcacacctgtaaacccagaactctgggaggctgaggtgggaggattgcttgaggccaggagttcgagaccagcctaggctacacggcaagacctcgtctctccaaaaaaaaaaaaaaaaaaaaaaaaattagccaggcatggtggcacatgcctatagtcctagctcccaggagtttgaggttacagtgagctatggtctcaccactgcactctagcctgggtgacagagcaggacccaattttgaaagaaagaaagaaagaattaatttccagttctctttgataaattctcagtgttaacgactaagacagaatccatccttttttcaactgtatggttctatatgatacctttgatagttaagctatattagtttattaccatacatttggatagttagcaatcaataagttttgtgctatctgtgaaaaataatctggtagtaagataaaagtgtgcataacttattttctgcttcagtacttaacatagttactattttcttgaagactgtagttttgtaatactatgctctttggtgagacaaagcgttctgaaatttgtgaacacttcttatttcctggtaattattttttttggcccccccagtttgacttttctttctttttggcttcttatatcactgtcccacgttaaaaaatttaacagattttaagatgtcttttggcttaaattgcaaacaattacatttgaaaattaatgaacttcgcgaaatttagtccagcctatatgaaaaagaaaactgttgtcagggtgagaatagatgattcgtgatttcagattctgccacacctttacaaatatttttcacactgttgccttcagaaaaattcattatgctaatccatcaagcttcagttccttcttaattgtttttttcaaacgtctcttctcactggtggcttggcgccatctctcactgctgacttcagaaatgaaatgtgatgatatgctgacataccagtgtcacaagctttgttacctttgaaaatcattatctttgaaacttctgcaagtagccacaaaacgagtgactcataccttttttatttttttccaacttttattttagaatcaggggagtccatgtgcaggtttattaccagggtatattgtgtgatgctgagggttggggtacaagtaatcccatcacccaggtactgagcatagtactcaacagttagtttttcaaccctgttcccctccctcctgtgcctcatacctcaaaagagatggtcattgaagtcagtactgtttcagaattaggaaaacattttcagttgtctttgagaaatcctaagtgtcaatcttagagcttgaggaaacaaacaaacaacaaccagaattcaccactttttcaactgtgtgctttttctttgatacctctgataatttagctatgttaccttattactgtacttgcatgttgtaaatgatcaatacatggtttttaaattgagtagggtatctacaagacacacttaactgcataatttgtgtctaaatatgtcatgtatgtattttttttgtgtgactcacttatagaaaggacttccctgttgtggttcttcggttgagataattaacacctcaaaatatcatatatagttctgaatttctagagttttattagttgtaaagtgattttagaaatgcactctgattctaaatgtttgtcatgtggatagaaattttgctatgaataatacattttcattaaaataaagacgtgtttttcatgctatatatatatatatatttttttttttttagtgtaattgcccatttgttcttttttttgtttgtttgtttttttgatatggagtctcactctgccacccagtctggaggggagtggtgtgatctcagctcactgtaacctctgcctctcaggttcaagtgattctcctgcctcagcgtcccaagtagctgagattacaggcatgccccaccatgctgggctaatttttgtattttcagtagagatagggttttgccatgttggccaggctggtctcaaactcctgacttcaagtaatccacccacctcggcctcccaaagtgctgggattacaggcgtgaaccaccacacctggcctgatttttttttattgtatatttctagttaggtgttcctttgttatatcaaactcagtatacctatagcttgccatatcatcttttcttctaattctgctcttcctgccaactttccaacttttattccaccttgaaattttagaaattttgcttaaactgtcttagctctttaaggtctaataagccaaatcttgtctcccagatttttcacttctcctgggattatttcagtccagaaaaatttcaatttattgttaaattgctaaagtaaccttctgacttcatctctagtttccatccctaccactccaattcatctggcatacagatgcatattaattttcttaggcaacccttgcatattttcttttgcaacccctgatagattactacaaagcctaagatttcaagagttccctgtgatccttaagatgagtctgtactcctcaaagaagctcttaagagtctccaggagatctccaggagatctcactacattgcccaggttggtctcaaactcctgacctcaagtgagcctcctgcctcggcctcccaaagtgttggcattacaggcatgagccactgtgcccagccccagctgcttcctgttcatgttaatacttggtatagtctttttaatttccacttgctggtgggtgtaaaatgctataatattggagctttaattcacagcttcatgagttttttactggcctctttggcccatattgaattattatctgtgagttcccaggcacttatcatctgtgctacttactacttttagttctatgtgacattctgatgccattgaattatttcaagagtatctcccacatctccagatgggctgtaccttctagaagggaatatttgtctcttattgtttactgtctggagtctggagtgcttagccaagcactggacccaaattgattgcttcagaccagagctaaaaactgcaaggttagaccttctgaattagaagtgtactcatttttgttaagtccacaaagattaaaaaattccaaaatgtagatgggtgcattcacatgacattactgaagatgagcaaaaacattccctaaatatcctgctggcttttatttttcctagtgtaaaaagatgagtattgttgaaatacattcccttgtcttcatggcttttgcaaagtttcactctatacattgcttcagttatccaatatacgtgaccaaggttaaatggttcttggtgctttatttgtcttagtttttgtggctagcttgtgtggtgctccttaaactggtctttggtgaacacctcttatttgtgataaaacaacaatgccatcaatcagttctttaacaattgtgttgtgccaaaacatttcgttggttctgcgaaaagaaagtgttaggtcaattacatattgatggaaataaagtaaattgataaagcatttctctttaatcaaaagtaagacagctttcgtattgggtacttattaacttttctacctactttcaacagtgagaaagataagcatataaatctcattgattttaatctttgcttttctaaagcttcacaaatttggagtgactttgataaaattcagtcagaattgtagttaatactttatgttagctacatgtttgcatatatttttccttctagactgtaaattctccgagagagggaccacatctttgtatctccaacacttaacacaggtgtttattaaaggcataacatgatctacaaccacatcagtagcacagacgaatcgcgcacacggcgtgttgagggaaagaagccagacacgaaaaagaacatactgcttgattcagggtttgaatcctaactcttcccaagttactgtataacttgggaaaattatagtgtccttatctgtaaactggggataataatagtactcacttcataaagtgttgagaggatgaaaaatgggaatgagattatcacttggaattttggaacctcaaaaggtttgatcctggcttactctgtcccagatgagctttgtgatcatgggtgagctatttaacctcgctgaacttcagtttcctcatctatgcaatggggatcatgccccatctacagaattgctgtgggaattatgtttacatagtgggtgctccaaaaatggtagttgtctttgttatcattgttataatacagcaagtcctatgtagagaggcattgcaatgatataggcaagaaagtggcatatggtgaaatcatagtgaaattagctcaacaaacgatgaagggtttgaattcttctaggaatgccagtgaattctcagtcatagagaaggaagtgacatcaagaacaatagcaaacagattcacaatccctttctctttctttctttctttctttctttctttctttctttctttctttctttctttctttctttctttcaatggagtctcactctgtcactcaggctggagtgcagtggtgtgatctcggctcactgcaacctcctcctccagagttcaagtgattctcctgcctcagcctcccgagtagctgggattacaggcatgcaccaccatgcccagctaatttttgtatttttaatagagacgaggtttcactatgttggctaggctggtctcgaactcctgacctcaggtgatccacctgccttggcctcccaaagtgctgggattacaggcatgagccaccacgcttggcccacaatccatttcatacaattaagttcaagtaaaaactgaaaggaaaaataaagaaaactctatagtaaaggctgtaacttttcccactgcaagccacaagaacaaaggcatcattttacatcatggcccagtacacctgtaatcccagcttcttgggaggctgaggcatgagaatggcttgaacctcggaggcagaggttgcagtaagcagagattgcaccactgcactccagcctgggtgacagagtgagaccttgtctcaaaaataaatacatacatacatacatacatacacacatacataagtaaatggatcgcagcctgcagcttgaaaaacactgccttaaactaacctacaagttgaaaccttcttgtttaattaactttttgtcttcaattatgcatctttcttcagtctatctcctttccttcttcacctcctttgacctttcaaagaaaatatggattaaaatgcatttccaccttttgattttgaggtgaacgatgttgaaggaaagccatttaaatgtgatatagcaatagcttctaagatatttattactgtttatttaggtgtaagttgaaagaaaaaaaattacaatgctattttgacaaatgtctcagtaaaagtattccacaaccagagtcttgattttatgactctaactgggtaatacaaacattggattcatataaaaacaacacttttagactttggagtacgctgttcctctgaagaaaatgaaatagaataatagaaaacttgtatttagaacttatccttgattttatttcctctttttgatccagtttcaaacttatgactgaaaagaaaaataggatagtcttatactctggttttgattgttgtaggtatcataaaaattgtaatatctgagatttttttttttaaaaagctctatgttgaagtctttgaattttagctttttctatgttttattcgttctgtttttgaattacaccaccctaaatgactatttatcatctaatatgttggatataatacacttgtttccacagacggtctggcagaacaacagttctgcctaaatttcaattcaggtgggcaaacatttgtggtgcaccttgtagccggtggtaatgcatggactaggggctgggttcataaatcgaggccgtggtcattgctttcctagagctggaatggggcattgaaaattgtccttactggtggctcacacctgtaatcccagcactttgggaggccgaggcgggtggatcacttgaggtcaggagttcgagaccagcctggccaacatggcggaaccctgcctctactaaaaatacaaaaaattagctgtgtgtggtagtgcgcacctttggtcccagttacttgggaagctgaggcacaagaatcacttgaaccgggaggtggaggttgcagtgagcggagatcgcaccactgcactccagcctgggtgacagagtgagactctgtctcaaaaaattaaaaaaaaattatccttactgaatgaaccctgtggaggttgttcagccctggttgtatgtccttgttgcggttagctaaaaatgtaaataggagtcattgagacctatacgtgccccagtcctaactactctccttctttaccatacccacagcttcttgcagaccagctcagccctgtgagcaggcagtggttggtcccagcttcattcaccaggcacgccttgaccttcagcagctgcatttagcctggctctggtccttggtcttgcaatgcccttgaaggagctgggtctccaggcactaacctctacctgaggctggcgcttggcctttgattccatcagcttggctttgagggctgttttctgagagtggagcgaagattgcctaagagaagagatgaaataaagagtcatttgggtagattagcatcagaaagttttcctattctctctgcaggaagggaatatacactggatggatgttactgtctcatcttctaacctcttctctttcaagtaaaacagagataatcttctatgcagatgctgtgttttaagagggcgaggttttgatttaactggaaggaaagtatctcaggatgcctgtcttctgtacctagtgcatccctatggtgtaggaaaatcctgctttcttaaggtagagcagtgattttcaggtgattttgtgcctcccttccactctcatttggcaatatttggagacatttttggctgacataataaggggtagggggtgtactattggtacctactaggtagaggccataaacttccataaacccacaggacagctccccaagaattatccaaccaaaaatgtctagagtgccaaggttgagacactctgccttaaaacctgacatttggatgttaggcatttcaaaagtttcaggaaactgcttgaattagggtgaatctgatctaattttaattccctgtaacattaattctgccactttgattttttttttaattcaaacagtttctatttgcagagtcatagattttagagctagacgataagtaccttagtaatcaccaactcccttgctttgcagaaaaaaatgaggcttagagatagatacttttagaggaatgacttatctaaggttacatggtgagctttgagacaacctaagactgagactcaggcctaccaagtcaatgaaaaatacagcaacttccttatgtattattagtttgatcaaagtttccctatggctaaagtgtaattcccagaagataaagatgctgctgccatccttgttcctattttgcttctcctgaaacattggacacttaataaattcttatcatgaatgctcctaagtgaaaaattgattttaaaagtgacacatagctattcaagtttgtttatttatttatttattctttgagacagagtcttgtcctgttgcccaggctgcgatgcattggcgcgatctcagttcactgcaacctccacctcctgggttcaagtgattttcctgcctcagcctcccaagtagctgggattacaggcatcaccaccaagcctgggtaatttttgtatttttagtagagacagggttttgccatggtggccaggctgttcttgaactcctgacctcaggtgatctgcctccctcggcctcccaatgtgctgggattatagaagagagccacagcgcccagcctgttattcaagtttaaatatgttaaatcgtcttaaaaaggagcatatatacttcttgatattcaatgaaatcctagctgacctatacgcaggaattttatctagattaattcttttaagctttcagccaggagccctgcctaatcacctacctggagagagaaacagtgatctcattctgaacgtgggccaacatttccctaacagcaagttcatgctgacatttgtggtatctcagctaattcagtggctgtcgtgtttgcaaaatagggcctgacatgtgcagttaataattttgtttccaggtgtttttcacacattaaatggaaattttcctgtccaagttactaattggaaaagcccaagattttggctttttcttaagaaccctaaaaaaaaccctttttaaagggaatatcatgttttggaaacatattgctgagaatttatgtgaaatcgtgcagttgtctgtgtgggcaattggtttatggtgttttcacccagggaaagattttttttgtttgtttttgttttgagacggagtttcgctcttgttggccaggctggagggcagtggcgtgatcttggctcactgcagcctctgcctcctgggttcaagcaattctcctgcctcagcctcctgagtagctgggattacaggcatgcaccaccacgcctggctaattttgtatttttttagtagagatggagtttctccatgttggtcaggctggtctcgagctcccaacctcgagtgatctgcctgcctcggcctcccaaagtgctgggaatacaggtgtgagccaccgcgctgggccccactcagggagagatttttatgtaccaagtctactgtagactgtagttcaatctccagggcctacaaggctggctcctgtacattcgtctcagtcttagcagaattggatgcagcagcggcaacctgccgttgcagcattcttttctgaaataccaaaataaaaacagagtcatttatcagtgaagcgaaattgtcctagatttattgaccttggctgtgttttttgtttactttattgttgaatctaatttcagcatcttggtgattgtgattggccatggcttcatagtgcattctcatgtcatgaggagctgtgttagatcagctccaggtgggctgacccattccacctgcaactcagagcctgcaacagctggctggcctttaatttcctgaattggaaacaaccctcgctcaaggaattcggccattatggtaagaaaataacttcatttattagaattttccttcacctcatcagactcaaattgaaggcaggaattatgtaagaaagaggaaagttacgacgtgctgtatgggcacatacctcttcctggttctttttgagatgagtgaactcctccgccgggtttcaatctgcatttctagatcatcttggacaaagtcatgtcattccggacttggtgcagactgttgatgtcagcttgacgctccagcgcagggtcagttcaatctcaaacctggaaaaagtttctaatgctttcagtggtcgttaggtttgtattattaatatcatgctgcattttaaatattttattagaatattatagaaatgccaaacgtctgttccttatttgttgttaatataatttgctattaactttccccatttttggcagtatgatggcactccatataaaatgctgcaagcttcggggaagaaccttttcagcatttttgtttcttagaacagagtgaccataccttgttggcctcttgtgtgttggggtcttctacacacacataaagtagggagttaaattaaagaatcctcagaaacacatgctggttcttttcagaaatctcacttgaaatatacctaactagaaattcttacttacggaagaaaattaagtggtggttccttcggacgtagaatcagcacagcattctcgtaaataatgtgcttccctgaggtttttaactaaaatatttttccattgtttaggattctgtttctaagaagaaaaatattcttttataactgtgattccagtgtaaaaagaagcatggcttcacatagtgttttttttttttttttttttttttttttttgagacggagtttcgctcttgttgcccaggctggagtgcgatggtatggcctcagctcactgcaacctctgcctcccggattcaagcgattctcctgtctcagcctcctgagtagctgggattgcaggtgtatgccaccatgcctggctaatttttgtatttttagtagagatggggtttcatcatattggtcagtctggtctcaaactcctgacctcaggtgatccgcctgcctcggcctcccaaagtgttgggattataggtgtgaaccaccacgcccggccttacctagtgcttatctccatagcttatgtttttcatcatgctgctaagggtaactatatcacacttttgtctgaagtccacagctgctagttttacgctgacgatctgtagcatgaagttgcattgtcagtgtttgcatctgaaatctggaaacgcaggacacaaaaagttgtgtctgatacacttgcattctgaacctctgtatgctggtgttgaggcatgtcaatttcaggtctttcaaacaaattttatatgtatacggttctttaatggaaaatagcatatacctctgcttttgagaataaaagaactgtaaggaatttagtttactttttcttaagtattttggaaacatttctagaattctttccgtaaaatgaactatacaaaagtaaacaaattaggaaaaaaaacatagctaagaagtatattctgttgcttgttaaatttcttccttaatctgccaaattgagaaaagtacaggtatatgtggaagatattgccaatcttttcaaattttgtcatttttagtgtggttctttgtctagcaaaacgtcttaccttgtttttaagttctgtaattatctggtaatacttcttgttgtcctgtttttctccttgatcattagcccaggctcaaatttcttattccattctttgattttatattcaagtgtactctttgcctgcaccagagttgagaccttgtccagggaaactgcaacatggtcatctagattttacactgcatccttcttcttaccagagaagaacccacccacctcctcccaagttggtagaaaatctccatctgggttacatttctgcctataattctttctttccaatgatcagtatctaattgccatagagtagattttggggctgcgtgtgacttgatggaagagcttagctctacaaagcccaacagagagagtggtaagggaatcatcaattagtaattcctcttatggttgataatgtggctgtttcatctctgctataattgttttaaatatttttaatgaaatatataatagtgttattattttgttaattattattattatttttattttttatactgtaagttttagggtacatgtgcacaatgtgcaggtttgttacatatgtatacatgtgccatgttggtgtgctgcacccattaacttgtcatttagcattaggtatatctcctaatgctctccctcccaccttcccccactccacaacaggccccggtgtgtgatgttccccttccagtgtccatgtgttctcattgttcagttcccacctataagtgagaacatgcagtgtttggttttctgtccttgcaatagtttgctgagaatgatggttcccagcttcatccatgtgcctacaaaggacatgaactcatcattttttatggctgcgtagtattccatggtgtatatgtgccacattttcttaatccagtctatcattgttggacatttgggttggttccaagtctttgctattgtgaatagtgccgcaataattatttgttaaactcaatagactatctttttattaaaaggcgcagaaaatgcctttaggtatttatttcatattggagggacaaagcagataatatttacatgatatcagcccaattaaatttgtgttttcccttatggaatttctgcacaaaggaaaatacctttttataggcacaatgcttataacacaaagtcctttggaatgatatgataaatattacttattttcagatgaagttatttgaaactaattttagggatttctggagaagtaacagaaaggggcagatccttaatttctgtatcctgtatattaaatatttgaagtatttaagaataaaatttaggaaaataatatgaaaataaatgacattcttctatttttttcttgaatttgattgattctaagaaaataaaaatttaaatttattaaagcctgtcttggaattttgaaatagctaatgatgtctaactttttccccttatcttatgaaagtatatgacctctcccctgcccaagagagttaaagaagaatggaggaactgacataatagagttttgtgggtggatttaatgttaaatagcaaacttgtaagtttctccaggttcttgtaaacctctgcagtggctgtgtcttgctccttttgcggttccttttgcaatcataggaaaaaaaaaaaacatgatttcttttttttttttttttgagacagaatctcgtgctgttgcccaggctggagtacaatggtgtgatctcagctcactgcaacctctgcctccggagttctcctgcctcagactccctagtagctgggactgcaggcacccgccaccatgcccaggtaatttttgtgtttttagtagagatggagtttcagcatgttggccagactggtctcgaactcctgacctcaggtgatccgcccaccttggcctcccaaagtgctgggttataggagtgagccactgcacccagtcccccatgatttctatattaccaaatgcatttttcttcatgtttgttgtcagtgcagtgagataaacccagaggttgatgaaggatgtttctatctatcgttcgtcaatcaatcaatctttaatgaaaggtgttagacaatattttttggtaaaaacaaacgtggtgtgagttgatgttctttctctgaatggcttttgcttcattttactttattggagagtctgagtttatccctatggcttcgaacatcctagtcactaaataaatatattttttaacacttttgttaaaattgaaacaacttaacactcattcttagaaaaaatattccaatgacaaatttaggaaacttatatatcaagctgatattgttattggcaagtgtggggctattggtggatgctacttgtattttagttctgttgcttttgcttttttttaatgacacaaaatatatttaatacgttaaatgagagactaggaaatatatttaaagatctttcaggctgacataatgaccgcaaataagtaagacaaaaaagctttggtaaaataagtagaattaaaaaaatgcagttctgtgaattaacacaagaaaacatcagatgaagaataaagtttctctgccaaagttccagctcaacagtgctgtgaatgtgatgtggctgctgctgttagacaatattaaaaaatttacaaagcccagaggtcgtcttcccccagctcttggcccttctgtttagttttgcatgtcatattctagagagaatatttaatagcaaatatgttaactacatccgaaacacctggcccatataatgaagagtatggaaacaatgccaaatgaggcatggctaaagaaattaggatttttgtctagaaaagaggagacacaatggccatttgaaaatagctctaaagggctaaaccagaatcaaagagctggaagttacacagggagacagatttggaaacgaagacatttctaacattacacctgttcttaaatgaaatggactgccttacaaagtcatgatctttccaagctccagggaccttcagccacagactgaagacctagaataatctttcagggacaatttctgttctgggtgggaggttggaataaaagtcaccacccaactctttaacattctgggaattttatgttgctatgattgtaatagaaatcacaaagcaatgatattgaatcttcatagaaaatttggatgtggaacagccagtggggcaagcaaagttacctcatcttgaatcggtgtaacaaagccctcatttgcataaaacccatcatggagatttaaaagtctagtgtcttggtcttagtcaaactaataaaaaatcacatgaagcaatttatttaaaattaataaagatcatacgaagcaatttatttacagacacctgcaagctaaaagcagagtgtgtctaaagatgaaagtgttagaattaattaacaaaagttgtgatagttatggaaaagctctttccacaggtcagtaaattctgggcattaatcatttcagttatgaattgcacaagtagagggttttcaaggatgagagaggatgcttggaaatgtgattacatttctcaaaatatatgttaattttttaataaaattctttgcagaggatcacctcaccaccttattgttataaaaattttagaatggctcttgcttagaattacatatcatatgtactttctgcacatataaagttggtttttggccaggcgtggtggctcatgcctgtaatgtcggcactttgggaggctgaggcaggaggatcacttcaggccaggagttggagaccagcctgggcaacatattgagaccctgtctctatttttatttttaaaaaattggttttcaatgaaatagtttcctccagttgctactactgtgagattatgaagctcatttcaagatgctcctgtcctgcttagaaagctggtcttcccctggttttgcccttaacttgaaatccagcttcagttttagtggccaaagggccatgtggtagcctgctttatatctgaactcagaccaatgggtatcttttttagttcttctggtctccaatgtcaacaggtttctcctgtctacatagatagaaaactgttctggaaattttgaagcctccctgtttaggcgagggagaagcagttttggaaaaatgaaaaaaaaaaagtacttttggggggtacctctcacagaaataggccacttggtgagtctaggatatgaaactacagaacttcacttattttggtagagtagaattctagctcatggaattaggagatggagctttaacttgtaatttttccactttatttaaagggagaggcctttaaataaatgacctctcccagctttattttcttcatctataaaatgggaacagtaatacctacatcagagagtttgtggattaagtgaaataaaatgtaaacatagatacaaagtgtttatatacataacacgtgcttatgaaatataaattccttttgccctcctgttttttctcctttggattgctcaaaaagttattctgctcgacatcacttattatagaaacatctacataggttaattatagacattaatttattgtaatgcttttacatcacaggtggaaccacatagagctacactttctctaatttttttttttctttttgagaccaggtctcactctgtcacccaggctggagtgcagtggtgccatcacagctcatagcagcctcaacctcctgggctcaagcgattctcctgccttagcctcctgagtagctgggactacaggcacatgccaccagtaccagctaatttttgtatttttttgtagagataggatcctactatgttgctcaggctggtctcaaactcctgggctcaagtgatcctcccgcctcagcctcccaaagtgctgagattacaggtgtgagccactcccgtaatcccagcaaaaccccatctctacaaaaaatacaaaaattagctgggcatggtggagcacacctgtagtcccagctactcagggggctgaggtgggaggatcgcttgagctcaggaggtctaggcagcagtgagctgtgattgcaccactgcactccagcctgggtgactgaggcatgcaatgcacatcctatcgcaattttgttataagctcgcatgtgcttataacaaagcacatgttataagcttcatgttccttgtggttctgtcagcaaaataacttcatcatgccccctctctggaagtccaagctttgtacacaggatacctctgggcttgtcccttacctgctatttaagtgctaacttttaaaaaagtggttgaactattaacatttgcttctttcctgcattatcatttcatattgacattgatattacaaatgagtactttgttttcagaagggcttgatcaatattttctgttacccaagtgtcatatctcagccactgaaaagtttttaaagtggtttattacttgtagtattttgttccttgaggaggttgtgtggataatattacttgagcttcattttgggtgatttatattcaccagtttgtctcctcctgggtgaacactgtctaattccacgaagtcgtcaagccagtttaggccactttccttagagcttcaaatactttagccgtttactctgagctgcctgctgtgaaccttgtttcttgtttgtcatctctgtgaggatggatgccacgtcgaccattctcatcattcttgtgtatacttccctgaggtgagaaagaaaaaacaaccctgtgaatctctggattaaaagtcaacgggtgaaaacccatgtgcgaggctgggtgcggtggctcacgcctgtaatcccagcactttgggaggccgaggtgggcggatcccaaggtcaggagttcgagaccagcctggccaacatggtgaaaccccgtctctactaaaaatacaaaaattagctgggcttggtggcgcgtgcctgtaatcccagctactcaggaggctgaggcaggagaatcgcttgaacctgggaggtggaggcgagatcgcgccgctgcactccagcctgggcgacaagcgagagactctgtctcaaaaaaaacaaacaaacaaaaaagaaagcccatgtgcatgtgggcatgagctctcccttcttacagtaaatccactcttagaaaaaagaaatgtgttcctctcattcaaaagttgaggctgaatgcagtcgttcatgcctataaccccagccctttggaaggccgaggtgggaggattgcttgagcccaggagtttgagaccagcctgggcaacatagtgaaactccatctctacaaaaaataaacaaaattagctgggcatggttgcctgcagctactcaggaggctgaggtgggaggattgcttgagcccaggaagttgaggctgcaggtgaatcgagatggcaccactacactccagcctgggcaacagagcgagaccctgtaacaaaacaaagcaaaaaaattgcctggagagctgaactttagggtctcacaataaacatattcctattgtagagttttaaaataattttaaggcaagtaataatgtatgaacaccatgtccttaactttttattcagcactgtaaatacgttttatgatccaaaatggttgaatagtttcagttttcaaaattgaacatgcccttaacaacacattctattgtgtctcagtgttctggtgtctatgattgggccttttctatatttgtaaacaatcattcagtacaaacgcagcatcttaacgcatgacaaggaagaacagatgagggttttcacctcgagatgactttcagagtagccttatacttttgccttgacatgaaaatagtactagccatgaacataggtctcaggtggccaaaatccacagctagaaggttagacttgagaagacccacagagagaggcttcgctgatgtggccgggatggcttaggttctgcaggctgcttacggcagatttccatttctgctcttgagctatgaatccagttggatgagctggttcagacttttagtatttcagcagagaagaagcattcagggttttatttattgtaatgatttgatggtggaaaacagctttgacttaagcaacttaacattgctctttttctttgagtagtggtttaatgtttattctgtggttagctattaaccttattctgtggttagctatttaagcagaagtcataatgtacccagaggttcattttaagttttattcaatgtgcccagaagatgaaaaactacatgttttgatgataggtttgatatgctcacacaattcttaattggttttatattggaagatacatgttcagatttgtccttttataactttacatttggctttttatgccacgtcccgtgttctttccttgaggactggcttgtagagttgattctctaatttgtgatatgggcatattaaattccttgattgagaaagcccttagccagcctgggttggtgctatgcctggttcttcctggggcccgtaccacctcctacccaatcttaacaggtttcatcatcccaaacaagacaagacaaagccatgtggcctcagggatactgtagaaatgaaagaatagggctatgaccaccaacgggatgaaagatcttagcagtggagactggggaaaagaaacaccagcttggcgaagtggcaggttttggctaaagatgtggctagatttggcaggggaacaagtgcctgaggatctcttctctttggggctttcaaggtttcaggaaatcagattgccatatcacatagccaatcttatttcccaagactcttttttggcccctgtcctaaatgtcctgtaaacacacatgtctgattcctatgtcacttctgatgcagattgtgaaatcaagtctttactattaacagctttttattgcttgctgtcttctttgtgttttagctcttcttctctgctgaaatgtgagctttttgaagtaggagggagattttgagtttcttttttatcttataaaatatcgagttcagtgatggacatatataaactagacattaattataagttgattattaaaataatcacatccttctttgtgggctaagccgttgacacggtagtctaatttcagctatcatgccactgagttcttatgtgatgccattaaaaatgcccacattaaaaaaatgactataatctgaattgtataaagaaggtaatgtgataccctacctcgttttaacctgattgtctctcttagctgagagagccggacagactccatttttgtttcttcacttgcagctcccctcccttaaaggcataagtagtgcaagctgactccgagcacatccaggaatgcgcttactgatgagatatcgaggcaagctaaatcagcagttcctgaggacgcgcttgggggatggcacccaaagcccctgcattatctctttgtgatagtttgagcccctgcacctggaactgtttacttttctgtaactgtttctgtaaccaattaatctttcttaattggtttgcctgttctgcttctgtaaaaattgcttcagctaaactccctctcccctatttagaccacgatataaaaagaaatctagccccttcttcggggccgagagaattttgagctctagccgtcttgttcgccggcaataaaaggactcctgaattagtctcagagtgtgtcatttctctataactcgctcagttacaacagtaagatataaagaatgaactgacattagtaatatagtcatgcagctagatcatacttgatagcttccttcctaggtaaaatactttttaaaaaaataagtaataattaacttgcaaaagtaaatttattgaagcatagaaacaattaaagcaaagttgttaattcagctatttcaagagcattctaatgaggaaataagaagatgcagaaaagttggctagtcatccatttctggactgaagcttttcctgaaattatccagaaagatgcctagattgatgccatttcttcgcttgtgtccttcttgatttttttttctttgaaagacacttttgttgatctggaagttccttatttaactttcacctcagaaatactgctgacttgagacgagacaaccttgccatccaccaactcctctacgatagtcttagtcactctagtcttgcttgaatctgaaaatcatgggattgcaatgtcagtctggaaactctcacagaaacacagagcaagagaaattcaatcacatgcattcaacgtgttctgtctgggtaagattatgtaaaaaatagcggactcttttagtatgacaagcaaagtatgtcttcacttttaaattacagaactattatcaatattaaaaaaagtctacctcgtccttgaccagaacagcttccagatcttgagtcaccagataccagatccctggatcccatgtttacagatcctgagtttctaccaccaaattctgcaaaactagaaccactggagaaaaaaagaattatgttttcctttgcagtttgcaaaggcaggagaaagcctccgccccggggattcttcatgatgaagttttggatgtgtttatgtgttttaattggattgtgtctgctgcttttttgttcaaccttgcactcctgggctcaagtgatcctcctgtctcagcctccccagtatctgggattataggtgtgcaccaccatgcccagctaatttttttttttttttttttgagacaaggtctcgttctatcacccaggctggagtatagtggcatgattacagctcactgcagcctcagcctcctgagctcaagtgatcttcccgcctcagtcccctgagtagctgggactacaggtgtgtgccaccacgcctggctaatttttgtatttttagtagagacaggatttcaccatgttggccaggctggtctcgaactcctgacctcacgtgatctgcctgccttggcctcccaaagtgccgggattacaggcatgagccactgtgcccagcctccagctaattttttaaaaattattttttgaagaggaaggggttttgctatgttgctcaagctggtcttgaactcctgggctcacgtgattctcccacctcagcctcccaaagtgctgggattacaggcctgagccactgcacgcagcctgtgtctgttactttattactctctatatatacaagtctaagccctgagtcccattttggttttataaaataaattcactaaggtatgcattttagtttgttcatgactttggtttaccctccctctccatcgagcaggcggcggtaggtctcgatctccacctccaggcgtgtcttgatgtccagcaattgcttgtactctgcgttctggcatttagtctcaccccagatctggcagatctcctcctccagggcactgatctgcgtttgaatttctgacagctgagccacgtagccagcttctgtgtcagccagggttccctccagggagcttttctaagagaaaaagcaaataaaaaattcatgatgaaaataaatcattggatgattttttaaaaatgcaattttatgtggcactagaagtgcaccttcgccatataacctatattgttatatcattgcttctttaattttggttggcacttctttttaaactaaatcttttatgcaaaatagagtacattatctttaacttttaatgctttctataatcataatgcagttctccttaacactgccttttttatgtgcctagtgaacctcttggcaaagaaagaaaactgcatttgcttaactccctgttggaaaatgtgaaaagctatttgcacataccatggccagttgggactgaagctcaatttccagggcttgcagggtacgttttagttctgttatctcattcttggcagaagtggctgccccagcatcagtggagatttgtgcttgtagtgatgcgctctaaatacaaacataatgcagctgttgtaggctgatgaaaggagcagaagcggcttgtgtgtggctactggcttaggtgctcagcagagaggatctacctgcttgttgaaccgctcctcagcctctcggcggttttgctcagccagctcctcgtactgcgccctcatgtcattcagtaatttggtcaggtcggtccctggcgcagcattcatttctacggtcacctcccctccagagcttccttgcatattcttcatttcctagcatgaaggaaaaaagactatcgtgatgcaaacagaaaagtgatgacttccgaaaatgtgcctagacaacaacaatttgaaagtaggacactgaaaggaaaaaaaaaaaatcaaatctaggtataatttactcatgattacttttgtttcctggtcatagtatgtgggaaattcacttagataaaaatgagtttattttacctttttttctttttttttctttttgagatggagtctcactctgtcacccaggctggagtgcagtggcttgatctcggctcactgcaaactccgcctccccagttcaagtgattctcctgcctcagcctcctgagtagctgggattacaggtgcaacaggtgtgcgccatcatgccctgtttatttttgtatttttagtagagagggggtttcaccatgttggtcaggctggtctcgaaatcctgatctcatgatctgcctgccttggcctcccagagtgctgagattacaggcataagccaccgtgccaggcctattttacttttttagagacacagtatctctctgttgctcaggctggaatccagtggcatgatcatagctcactgtggcctccaactcctgggttcaagggatccccctgcctcggcctccagagtagctgagactaaaggcatgagccactgcacccagccaattttatttgtatagaatgcatatggggagaaatatgttagctagagttattcgtttatgtagaacatgttcctacctcctcgtggttcttcctcaggtaggctagctcctcggtgaaactctcaatctgcatctccaggtcagagcgggtcatagtcaggtcatccaggactttccgcaggccattgatgtcagcctccacgctctgccggagacacagctcgttctcatacctggaaggggcagcagtaaggcaaaaaatactgtgagctcacctggccgtgtttcaaagggtaccttccattcttacatattgaaaaagttctcacttgtgggcattttaataaataaaggttattaagttttctcttgggaaattttcccttgtaaagaaaaataccaatgtaatgttaattctaatcatgtctaacatttttaataataaaattctcattctaaatttgcctctttcttttttctttttcttttttcttttgcagctgttgtaggctgatgaaaggagcagaagcggccggtgtgtagctactggcttaggtgctcagcagagaggatctacctgccccagcatcagtggagatttgtctaatggtctaaagtttacccttgggatgtttgtaaatttaggtcatgatcctctagtatatatatatatatatatatatatatatatatatatatatatatatatatatatatttatttataaaatggaataaaatttatttttctcccgtaacacttgttttcaagtctttatgtttcttacttcagtctgaagtcatcagcagccaatctggcattgtcaatgtgcaaaatgatcccagcattttcaacagtggcagcaatgatctaaaaaagatgttaatagtgagtgaatcacgaatgatttttaccttgtgtctgcatgcctacttgtaagggtagctgttgcctgtgttattagctcttttttttgtgtgtgtgtagagacagagtctcgctctgtcgcccaggctggagtgcagtggcaagatctcagctcactgcaacctccgcctcccatgtttaagcgattcttgagcctcagcctcctgagtagctgggattacaggggcgtgccactatgcccggctaattttttttgtgtgtgtgtttttagtagacacggggtttcaccatgttggccaggctaatctcaaattcctgacctcaagtgatttgcccgcctcagcctcctaaagtgctgggattacaggtgtgagccaccgtgcccggcctgtgctattagcttttaaaggtgacttgctttgcaaacttacttagtaatgactaagtatacagccccagacctgtatatctggggctggtatatttaggactacatctttctgcaaaaagataacagtctgcacatttattggactaggcacaggaacctgttttacaggacatagtcctctgcatatttctgctactttgttagatcattatctcatgagctttttcagaaaatagtgcaaaaattgtatttcacttccaaaaaagtctttaaaaatatatttcccatacaaaagtggctaaacattttagattctactacattcttatgtaatgtttgcaccagattttctgggaagaaaaataatactaaagaatatttaaatcttgtaagacaataaaatgtgtcagtctgtcagaattcatcataaataattagattaaactaatgttgactcactgccaccattcttatatataaatgataattagctgcctggtgttgtataagttttactgttatgtagaaatactgaaactgagatggaaacagaaaattaatgtgattggacatcacataaggtactataataattaagacacatcaggtcccactttgcatatgtaacaagcaaatatgttttcaaataatttcttaaaattttcattatagtacatgatctgaaaagaagtgaaagatccacaaataatagaaactcaggcacagatagtctcacctggtttctgagatcttcaattattgaatagtatttgctataatctcttcccgatccaccgtctccagacccaggcccatatttgtcataccactccttgattttgttctccagatcagtgttagcctcctccagggctctgaccttgtctaggtaattggccaagcggtcattgaggttctgcatggtttgcttttcccctccagagaaaagccccccatcgccaacaccacctcccataccaccaccatagctgtagaagcctccagtagcaccactgctgaatctagaactcccacagaatccagaacccctgccaaatccagagaccccgccaaagctagaacccccaccaaatcctgtcccagagcctgaagctcccccaaaaccaccccctactgagcagctaccaaagccccctccaaagctgcccccaaaagcaccgctagaccccccactcaggctgcagctgctggctcctcctcggaagccctgggccgagctgccccccagaccacatctgcttccactgctgaagctgcttccaccagcagacaccctggctgagctgctgcctccagccctggaggaggaggcgcgagacgagcaagacatggtgctcctgcaaacatgagcttgtccaggcgaataggagaggtgatgacgaagagtgtattcaaggctgcctttttggcctttatatacacacttcgagggtgttccttttctctgtcacttcttaatccctgttacagttttggtaatccgtaattggataatttctgtttcttgaacacttctctgaagctaggtcagagccctgggacatttactatatcaataaaaaaagaataaagtggagcaaaacaaaaaaattttcagaattacagttttaatctttcagaggttttgatgattggtaacttttctctggaagtgtagttctattaaatttgcttcatgatttcacatttgcagagaatatctccaggttaacaaatgtaattaaaatacttaatatgatgagaataaaaatttcccatcaatcatgtaacttttttgttcatattgttctcaaaagttgaaattagctttcacatcagcaataatttcagatttgattaagcatccatctctttgattatttcaatcagcgtgttttttaaggttgttgaagtttgtgattttaagttattgctttctttttttgtattttgtataatatacaaaaaagcatataatttgtaacaattatgttttatagttcataagaaaaacataaataatagttttctaggtaagtattattacatctcagcaacatgtttattcaagtagctaatgtctaagaaagattgaaaagcttttaggcagattgttttaatacgattttctttctggttgaattctagtctgatataaagacagcaacttcctttttgagtcaaatttcaagaaatgaagagatgatgcagatatctcctgccttcgttttaaagataaaagaggatttgtatctacttctgataactagtgttacaattggagttattttatagattctgaaccctcctgagctccctttgtgcttcatggctttttgtccctttgtattttagactgtttccattcatgtcttctagtcacttcaccggtttaatagtgtctttttgaaagacagatactgtataattccagtactatgaggtgcctagagtagtcaaattcacagagacagaaagtagaatggtagttgccagtggccgaagggttggggatagacagttgttgcttactgggcatagaattttaattttgcaatatgaaaagagtttggggccaggcgtggtggctcacacctgtaatcccagctctttgggaggccgaggcaggtggatcacctgaggtcaggagttcgagaccagcctggccaagatggtgaaatcccgtctctactaaaaatacaaaaaattagccaggcatggtggcaggcgcctgaaatcctagctacttgggaggctgaggcagagaattgcttgaacccgggaggcagaggttgcagtgagccaagattgtgccactggactccagcctcagagacagagtgagactcgtctaaaaaaaaaaaaaagaaaagagtttgggagattggttgcacaacaatgtcagtacacttaagactactgaactgtaaacttataaatgatgaagatgataagtttatgttatatgtattttaccacaatttttaaaaagtcttaaaaaacaggtgcttccagaaatagtttgtatcctccttagctttaaacttaagtagctgacttttgtttatttaagaatttcttccttcttttgccagtctctgttaaactatgttcacaccttaatctttatattcaattatttgttaaacaatgttctgctttaaatttttccttaaattgcattttattgggacacatgattaaataggtaatcattcactttactatgtagctcttatgtggcttttatgatctacctgtactgttttcacaggagtatgatgttactcttcttcatatttagggtgacatatctccaaggggtacatggtgtacaaaattttaaattgttaagctgggagtaatttttataacgcccttctaaagtagctaaaaaatgcaccacacataatgtgttggtcatcctgcctcgcccatccctaaagctgtgaaaccaaagaaaactaaaccctaatgattaaatggtatgcaaatgctggcaatgggaggaacagtcacagagtgtttctcccttttaaaactatgaaatgtaatctttcaattttcataaagacttgcatttggctgaaagcacgtttaaatcccagctccttcggaggctgaagcaggagaattgcttgaacccggtgggtggagcttacagtgagcagagattgtgccactgcactccagcctgggcgacagtgcgagactccatctcaaaaaaaaaaaaaaaaaaaagacagagagagagagacagactgaatcttaggtgtctgggctcccagttcaaattttgaatagtttgtgattagaagtttatttctacctgtaaagaaacatataaaagctatatttccttatagaatatgattttaataataagtgcagaatgatttgcagatagtaaccatcaatttttttttgtgtgtgtgggggatagattattagtatttaaatatttttcagattaacatattgcaggtttttagactagtaggaaaaccaaatactgaaatgcatggcatatggctcctgatgaatctttacagaattgagaacagaacttgggtattctatcttctgttcattcaagaaaatatactgttttgtgtttttcaaatagaagcatcacatcagagtagttaagggaagttgctgggtttagagtatttgttgaatgttgacaaaactttctgtggcagacagtaaaaaagaagggaaaatatacatttaaaaaaattttaacttttaacttttgtgggtgcatagtaggtatatagatttatggggtacataagatattttgatataggtgtacatatcccatcagggtaaatggggtacccatcacctccagcacttatcctttgtgttacaaacattccaattatactattttttagttattataaattatacaagtaaattattattgactatagtcactctgttatactatgaaacactaggtcttattcatttttctaactatttttggtacccatcaagcgtcctcacttttcccctactcccccgtttcccttcccagcctctgataaccatcattctactctctatcttcatgagttcaattgtttgaatttttagctcccacaagtaagtgagaatacacaaagtttgtctttttgtgcttggcgtatttcacttaacataatgacctccagtttcatccacgttgttgcaaatgacaagatctcattcttttcatgactgaatagtactccgttgtgtatatgtgccacttttttttttttttaagacaggtttcactctcgtcacccagacttgagtgcaatggcgcgatctcggctcactgcaacctccacctcctgtgttcaagcgattctcctgcctcagcctcccgagtagctgggattacaggcacccaccaccatgaccagctaattttcatattttcagtagagacagggtttcaccatgttggccaggctgatcttgaactcctgacctcgtgatccgccctccttggcttcccaaagtgctgggattacaggcatgagccaccgcgcctgacctgtgccactttttctttatccattctactgttgatggatgcttaggttgcttctaaatcttgtcagtagtgctgtaataaacatgggagcacagacatctctttaatatagcaattttctttcttttggacacattggaaagtataaatttgatgtgtgaacagtctctttgcaatgccgttgcaatgacagatagtagatagacaataaatattccttgaattaataaaaactaacatggcctgattttcttcatgaacaacttggatcactgattacttttgttctttactatgtgttgtgttttgttttctgaatctttatgctccacttctgggttagtgattctcagtgtgtggtggcggagagcggggcttggcagtaagaggaaatgttgtttgggaagagggcagaaaggtcaggcaagagtcaaccggggaccttcctgtagggaatcattgtttgggccagcttcctgctggtggctgctctaggccccgccagggtcaactacttggaagagaaaaaaggttttgcaataataacatgactaagagcccactccagtagatctggcaccacccgtcgatggattgggtgtgtcattgtcacaccccagaaatccaccaattctgtggctgtttctcttccttcatcactttctctccttccccaccaccctcgtccattctttctcttcctggtttcacttaagtgtgtctatttgaaggcttcctcttctccaccaggaagcatctgcttggtcatgccattttgccaaattttgttctgggaagaaaaatcacctggctttgttcttgtatgtgagtgctttcaaatctctttaaataactcaattctctatgtttcctgaagatctttccgtgagtttatggagaattaagagaatgggtgagtgactttgcgggggttgggatgctttgtcctccaggctccacagataagacagtttgaaataagcacagttttcaaggattagctctgcttaaaaagtccttttgtgcctttcttcataccagacagacagtagtcttctcttcagagaatccaaaagcatgaacaatccagatcataacttgagcagtagggcctagcccctgtgcctcttgccaatgctaagttgatacactgggccttcctgctctgtctcttccagcttgacccctcaacctcctgctgccctctgatgtcagagaagctgcaaatctttggtcaaggaatccagggcttaaatagtagtttcatagcaaaagaatggcatggtattttacacaagatcatattttatatgataggctcagaagaaagcttcatcagtctcaagtctcttgtcctctgtccaccagaactataacacaacatttgagtacagtcgatgtctcttgaccaagccaccatgtcctcatctgtaaaattattatattggtctatccacttctcaggttcccttccagctctaatttttagcaatctggtaattaaatgtattacttctcagatttagaaagtgttttatattactattaggtgagattttctttttttcttttcttttttttttttttttttgagacacagtttcgctcttgttgcccaggctggagtgcaatggcgcaatctcggctcatgcaacatctgcctcctgggttcatgccattctcctgtctcagcctcctgagtggctgggactacaggcaagcaccaccatgcccagctaattttgtatttttagtagacgcggggtttctccatgttggtcaggctggtctcgaactcccgacttcaggtgatccacctaccttggcctcccaaagtgctgggattacaggcgtgaccactgcacccagccaggagggattttctttactagagcattagctgcaaaagttcactgcttgtgcttgagaactgggtagagtggaaattgtgcttagaggtccccttaactggcctctacgtgtctactccaaggtaagctcttataaaggcacccaactgaggaaaagaatacttgcctagagattctttcaagacaatgttcttgatcagagttacaattagaactaaacaataagaaagacaaccagaaaaatctctgtgagttgatacattctcttagataactgtggtataaagggaaatatatattaatgatgagagtgtcttttgaatactgatgagatggcttgcggctaggggcctctcaatagcttcaggataaggactggtctccagaggaccaagccttgattagaagcttagaactttcagccacgtctcctaacctttggggaggggagaggggctgggtattgagttaatcacaaatggccagactcatgtctatgtcatgaaacctacataacccttaagtcaggggtccccaatccctgggaattgtatgaaggaactgggccacacagccagaggtgagtggaggctgcacgagcattaccgcctgagctccacctcctgtcagatcagcagtggcattagattctcataggagcatgaaccctgttgtgaaccgtgcatgcgagggatctaggttgtgggctccttatgagaatctaatgcctgatgatatgtcagtctccaatcacccccagatgggactgcctagtttcaggaaaacaagcccagggctcccactgattctatgttatggtgagttgtataattatttcattatatactacaatgtaataataatagaaataaagtacgcaataaacgtaatgtgcttgaattgtcccgaaaccactccacccacctggtctatggaaaaattgttttccacaaaaccagagcctggtgccaaaaaggttggggactgctaccttaaataatggggctcagaaagcttctgggttgatgaacatgtggaggtgctgggagtatggtatgtccagagagggcatggaagttctgtgcctgtttccctatatcctgccctatttatcctttctgtttaactgttcttgagttgatcctttataataaactggtaatagtaggcaaagtgttttcctgagtcccgtgagtcattctagaaattatcaaaacttaagtggggaagattgtggaaaccccaaactttgtagcgaatcagaagtatgggtaacctggtgtacaagtctgttcttgcactgctataaatgaataaatacctgaaactgggtaatttataaagaaatgggctcacagttctgcagggtgtacaggaagcatgatactggcatctgctttgcttctggggaggcctcaggaaacttacaatgatggcagaaggcaaaggagaagcagacatgtcttacgtggccggagcaggagcaagagagagatgggggaggttccacacacttttaaacaaccaaatctcacaagaactcactcactatcacaacgacagtaccaaggcggggatggtgttaaaccatgagaagtggcccccatgattcaatcacctcccaccaggccccacttccaacattggggattacatttcaacatgagatttggtggggacagagatccaaaccacatcacctggggacctgatacttgtgactagcatctgcggtgagggcagtcttatgaggaggagcctttcaacttgcggagtctaacactaattccagatagttagtgtcagaattgatttgaatgttaggatacccgcttgggtatcataggaaaaaaagaagcctttcataactgttggatcaaatatgacaaaccagaaagtagtgaaaaagtccaggcatggtggcttacgcctgtaatcccagtcctttgggaggccaaggcaggaggatcacttgaacctacgaatttgaggcttgcagtgagctacgattgtgccactgcactccactctgggtgacagagcaagaccctgtctctaaaaaaaaaaaaaaaaaaagttaaaagaaaagcacttcatacctggacttttgggatgtagctaactttgaacagtgaagaaaatttatagcctctaatggctgctttgttaaaaaagaaagaccaaagatgaagacatttagtataaaaatttcttttaaagaacagcaagataaactaaaaaatataaaaataaattagtaaaaataaaggctgaaattatttaaacagaaaagaaaaaaatacataaatatgtcgaaaagctgattcttttagagatcaattaaatagacaacctcttcatgagcctgattaggaaaagagagagaggtccaacacacaaggttggaagtgggaaagagacataactgggtatagaacagattaaaataattataagagaataccacatataaggcaatggcagcactcttggagacctttctggtagttagccaaattattattgcccagtgggtgatctctgtgctcatcagaccagtcctggcaagactcaccccagggacagtgacagggacagactggggtgctcagcctacctgcagtggccctggggcatgctgggagagaaaggggcacagggcttaccctaggaggagagggccctggagaagccatggcaaagctgtgaccgtgggtgggcagagctgatcagagtctgcagatttgagctgggcataagaggctgtgggatttggacacaggggccatccatactgttaccagaacgtggagaagagccagtaggaatactggctatgaagccagatccttccagaaagggagaaaggaacaggactctgttgtgatgtggaggctgactaggtggagtgaggagaaggtcccagcaagcaattgtgcttgtcttttttgtgcctgtaaccaggagggagacagagaaaccaggtgcccaggaaaccttgattgaagggtgccaggtaagccctgtccttcccacagtggcattcaacagcaaggccaggacctaccattatctttctgtgtgtagagtggacacaagcacatatttctaaagaggactaatggatgatctttaggtactaacttgtgacccattcattggaggtcactgggtgtttctagaagtacttttgatgtgactgatcttggagcaaagcctcaaatcacaccttattctgttctttctatgtatccaaattttaccacttttcaagggctatctcttctggaacactcttctggaacactccaacccttcatttaccagcttctccttttccccacataatttttcttattattcttacggtttctaccacattacttatcacttggtccttcttgtatttttctttgacaataaaaaaggagaggtcgggcgtagtggctcatgcctgtaatcccagcactttgggaggccaaggtgggtggatcaatgaggtcaggagatcgagaccatcctggctaacatggtgaaaccccgtctctactaaaaatacaaaaaattagactggtgtggtgttacatgcctgtagtcccagctattcgggaggctgaggcaggagaattgcttgaactggggaggtggagattgcagtcagctgagattttgcctctgcactcaggcctgagtgacagagcgagacaccatctcaaacaagacaaaacaaaacaaaacaaaacaaaacaaaacaaaacaaagagtattcatttaaaaaaatttaaacatacagatggcttttctttaaagacttttaaattttacaagttctacacgtttacttcagaaaaatgagaaaatgcatgtaaacatgcagcaggaaataaagatcactcataatttcactatcccaaaatagtcactgttaacatttggatgtatattggttttgcttctttttttttaaaaaaaaaaaacaaaacaagtaagtacagtgatacagtttgggcctgtgtccctacccaaatctcatggtgaaatgtaatccctgatgctggaggtggggcctggtaggaggtgattggatcattgtgtagggggcggtttctcacagtttaacaccatccctcctccaggtgctgttattgtgatagtgagttcttgtgaaatgtggttgtttaaaggtgtgtggcacctccctgccccttctccctcccattctggttatgggagacataccggcttccccttcaccttctgccatgattgtaagttttctgaggattctccagaagcagaagccgcgatgcttcctgcacagcctgcagaaccgtaagccagttaaacctcttttctttataaattagtcagtctcagatatttctttacagcagtgtgagaacagactaacacatacagtgttaatatacatgtaattacattcttataaaagcagatcatactatacatattgtcttaaaactctgcttttcatttctcaatagacgattgacatctttttaggttaataaatgaacctgagcattcttaatggctgtgtgaccatcctttgatggactttgatgggtgtttcataacttagcctattgattctccattgttgaatattttattatagcttacgtttcactatgatgaacagctgagaggagtatacatatattaataattgattatgtaagaataaattcctagaaatgaaactgctggctctaaggatatgctcttttcttaaaaaggcttttgatacctgttgctgaattgttttcttaaaggttttgctagtttacactccattagtgccttttccctacatccttgctaaaataggtatttattattattaaacaaattggacctgttttgatgctgaacatggcatctcattattttaatttgcttttcttttattacaagagatgttggacatcatcactttttaatgtttgttggcgattcgtattttacgaatttcttgtgtgtatcatgtatccgtttcttattgatatggttatctctgttcctgagtttatatatggggacatcagctctcggatggctgtatatgacaagtgcagtgaaaaccccgggtaccatgtggcattgctgaaaatctagacttaaagtgattggctgttggcttccattctacatgcagcccccaagagggtaggctaaagttcttattttctggagtgttggggggatatatggcaggtggacaggcggatggggtggctagggagaagatggggaatggggaggctgaggatgagtcagggcaactaaacaggctgcccattcctggaactgctgctttcttggaaatttgcaagcccccaaatcctcttgattttagacagataagacagcagacagcaggtggtgccaaactgcagctagggcatcgtgatttaaagcgtgcggtccacgtctggactctgtggtctggctgcacagacttcccttggtgttggagcaggttttcaccatacttcactaaatttattttttcttttgcttcttatttcacgttattttcttgatataaatctgtcctccttttccttcatgatgtttttgtttttgatgaaacaagccatcaccattccccaaatacataattaaaaaaatttaaagtctgtaaaagtttattttcttttatttctgcaacttctgtagaatttattttggtgtgtgtgatataactattcaacaccctccttagcctcatccccatcccggctcctaccccttagttaactagttatttcagcagcctttattgaataatctacttgtccacaactgatttgaaaatgtcattcttatatactgatggccctttttctggggtgttcatgcctgtgtcagtggcacattgttctaattgctgtaaagaatacttttttttttttaacttgtgtttcctggaaacagactctgagatggagagatgtgtgctgaagtttatcagggagttcttttgtgagataaacttgtcagcaggtgggtaagactggaatgggcatagggagaggcctatgcaatgctgttttaatgaaggcttccgctgattctttggggagctctggacagggctcacccttcagagttatcctaatttaagacagggggccagaactttgtatcccctataagcgagttactggcccatgggcactctcctgaaggggcataatcctgggcaaggcagaaccctgtgagggtggctgttagcagcccatacgccagcacctggagctggatgcatctgccctggggagtatccacactacatgaatgttttgctatctggaagctcaagtcattcctcatcataggtcttgtatttttttttgagacagggtcttactctgttgcccaggctggagtgctgtggtgccatctcagctcactgcagcctcaacctcccgggctcaagcaatcttcccacctcagcttcccaagtagctggaatcacaggcatgcaccgctatgcccagtgcctggctaatttgcccaggcgggtctcaaacttctgggctcaagcaatcttcccaccttggcctttcagagtgttgagatttcaggtgtgagcctccgcacccagccctgattcctctttttaaaaacacttgaagtcttcattttcatttgtattagcactgtctttacaggtagagtgtaggtttttaagcctgggcaccatcttaatatgtatgtatttttgacacaagaaagctggaaaactgcagccctatcagatatttcataatttttttggagtggttttggactatatgaaataatagatttcaagagtcagtgtgaaactacagtgagataccacttaatattcactaggattgctataatttaaaaaatcattaacaagtgttggtgaggatgtgaagaaattggaatcctcctacactgctggttgaaatgttaaatagtgcagccactatggaaaatagtcgggtgtttcctcaaaggttaaacacagggctaacatatgacccaaccattctactctaaggtatattcccaaacagaaatgaaaacatgtgtcttcacaaaaatttttgtgtgaatgttcatagcagcattattcataatagccaaatatcataaataacctaaattctcatcatccaatgaatggataaataaaatatggtatatccatacactggaatattattcagtaaaaaaaaagaatgaagtactgatacatgctacaatatgggtgaatgttgaagacatcttgctaagtgaaagaagccaaacacaaagaccacgtatcatattatatgattccatttatgtgaaaagtctagaatgggcaaatatataggacagaagatgcattactggttgcctaaggctgggggtgggggtttgttgggggaaaataaggactgactattgatggatatgtgatttctttttgaggtgataaaaatgctctaaggttgactgaggtgataattgtaccgctcagtgaatatgctgcaaaccattgaattgtgcactttaaatgtgtgagttgggccgggtgtggtggctcacatctctaatcccagcactttgggaggccaaggcaagtggatcacttgaggccaggagttcgaaaccagcctggccaacatggcaaaaccctgtctgttctagcaatacaaaaaaacattagccaggcatggtggcatgctcctgtaataccagctacttagaaggctgagacagaactgcttgaacccaggaggtggaggttgcagtgagccgagatcgcaccattgcactctagtctggttgacacagtgagactctgtctcaaaaaaaaaagaaaaaaagtgtggattgtatggtataggaattatatctcaataaagctgttgtaaaacaagtcagcgaaacaaaaggacaaagattgatgtagttgatttgcaacaggcaaaaagtttatcgacacagaatgattaagaaggaaaacacattttgcaatttaaagacaaaaccgaaccaataagacaaaagaatctgagaaaggattacaggagtagctgcagctctgtggccgcaggtttgttgcagtgcttcagcacgcctttgttaggtgtcatcatttacatcctggggacaggactcagctgcctgcatcttactcttgaattttacatcagaaacagtgttgagatgaaattagttggtcattatccgtcaccagcctggttcctctgcttttatgtgaatctaaaacagaaatagggagaattttagaactggaaatgtaaaggttggttcacaagtcatgctttaaagtgaatgactgtagcccagatttttgggggtaaggaaagcacattttattcatgatggatgctcattaaataagcagaaagtattactttaaaaagcgactcttcccctcgattgagctgtgttggttattcctttggagtccacagagaatcatcctttagattcagcttctctggcctcagaactgttgacaaataaaagaaatgattgttgtcagttacttctctttggccaaaaactgtaaagaagcagacatattttctttctgaatggaacgagtgttggtgaggatgtgaagaaattggagccctcctacactgctggtaggaatgtaaaatagtggagccactatggaaaatagcctggcagttcctcaaaggttaaacacaaggctaacacatgacccaaccattccactctaaggtatatacccagtcgaaatgaaaacatatgcccacacaaaaattgtatgtgaatgctggtgccagctgaacattattagtagcatgctgggcgaatggttcatgcctgcaatccaagcactttgggaggctgaggcgggaggattgcttgagaccaggagtttgagaatagcctgggcaacatagtgagactctgtctctaccaaaagtaaaaaaaattagaccagacacagtggctcgtatcggtaatcccagcactttgggaggccaaggtgggtggatcacaaggtcaagagatcgagaccatcctggccaacatggtgaaaccccgtctctactgaaaatacaaaaattagccgggtgtgatggtgagcgcctgtagtcccagctactcaggaggctaaggcaggagaatcacttgaacccgggaggcagaggttgcagtgagccgagattgtgccactgcactccagcctggtgacagagcgagattccgtctcaaaaaaaaaaaaaaaaatacaggcatggtggctcatgtctgtagtcccagctactcaggaggctgatgtgggaggatcatttgagcctgggaggtcaaagctgcagtgggctgtaaacacagcactgcacctagccttggcgacagagtgagaccctgtcttagaaatgactgcaattatctaggagatacaaaaaaaactaatgaacactttaaggaataacatgtaatttcttatttacattcaattatcaagatatagatgcagaaaaattttaaaggaactaacgcccagtgtcaattacattctaaataaatctagagtgataccatggaaagttgttttttttttcttttctattttctactagcttttcagattgtacttgatttgaaacttgctaaaactgtaaatctcagtctctgaataaaaaacaatttcttcatttttaagaaagtgattttaacaacaaaatcatggtatcggtgactcaccctccctctccaccgagcaggcggtggtaggtctcgatctccacctccaggcgtgtcttgatgtcctgcagttgtgcatactctgtgttctggtattcagtctcgccccggatctggcagatctgctcctccaggatgctgatatacatcttaatttctgacagctgagccacgtagccagcttctgtgtcagccagggttccttctggggagctttgctacaaatgcccatgaaaattgaagcattgtcagaataactgctcagtattcaacatatgaaccctgaaacatatattttgtatggtgagggtgtctccaaatgaaccacttaatagagatttacctttgataattaataccgaataatagtaatgatagcaaatattaatcagagagtactactgtaaccatatagcaattcctactcactattaggcactgttcaagtattttataaatattgactcatgtaattctcataacaaccttatgagataggtactattattcccatttacaaaagccaacattttgctagcttgcttcaaacagtgtctgcaaaacaattttttaaaactatagaagaaaattgagtgagtgcccctttcccacctaccatggccaagacagactgcagttcatgctggagggactggaggacttgtttcagctccattatctcactcttggccgagctaactgcttcagcatccgtggagatctgtgtctgcaaggatgcactctgcaagcatgaaatcaacaaagtacagtgaaatcaaagaagctccaagcactctgcctggctttctatcttctctcactttgccaggttagggttcatgttaggattagggttgagctacctgcttgttgaaccactcctcggcctccctaaggttttgctcagccagttcctcttactgttttgcctcatgcagttcagccgcttggttagatctgcccctggggccgagttcatttctacagtcacgtccccactggactgtctcggcaaagtactcatttcttggcggagaagaaacgcaaaagtcacagtagcaaaaatcctttgaggttggggaccttgctgaatggtgatggtgatgggaagtcccttgatggatttatttctcctatctccttggggttgttctggagatatgccaggtcttctgctaggctttcggactgtattttaaggtgccatgtggtcacattcagctcactgagtactttttgcagatcatttacataggtttcaactgactggcattagatagagctcgttttcataccttaggagatctttggaatatgatgtatgaattagattaactactttgagaagctttattttaaaaaggacttgtccactgacatccagctcaagttgaaattcttttgaaatatttaaacaaagactatgaaatcatttttatttcttaattaattaattttgagaaggagtcttgctctgtcccccaggctggagtgcaatggtatgatcttggctcactgcaacctccacctcctaggttcaagtgattctcctgcttcagcctcccaagtagctgggattacaggtgcctgccaccatgcctggctaatttttgtatttttagtagaaatgaggtttcgccatattggccagtctggtctcaggtgacctcctgacctcaggagatccaccctccttggcctcccaaagtgctgggattacaggcacgagccaccatgcccggcctgaaatcatttttaaaaattccaattttggaatctcttgtcattaaatatacattaaaattggccttttttccttcagtgtagatattttacactaatatattacatttatctgatacttggatctaattgcctttatatacattttatgttaaaagtaaaaacataagtcttattttttgtcatggtaacaactgatattttgaaacaaactcacttcattttgaagtcatctgctgcaagtccagcactgtcaattggggaagtcatgctggcattattaatcgtggctgcaatgatctaggagatgcaataaaactcatgaacattttaatgagtaacatgtcattactgatttacctttgactgtcaagatatagttgcagaaaatttttttagtaactaatgtccgtgtgaattacattctaaataaatctagagtgacatcatggaaagttttttgtttcttttctctctctctctctctttttaccaaatatatatctgaaacattctgcatggaacaattgagcaaaaaataaaagaacaatttcacattgtcttcaaatttaataaataagtacaaaagaggtaccatcattgagtttctcacctggtccctgagatcttcaattattggatagtatttgctgcaatctcttctagatccaccgtctccagacccaggcccaaatttgtcacactactccttgattttgtgttggcctcttctagggctctgacattgtctaggtaattggctaggccgtcattgaggttctgcatggtttgcttttcccctccagagaaaagccccccgttgccaccaccacctcccatgccaccaccatactgcagaagcctccactagcaccaccgcctaatccagaacttccacagaatccagagatcctgccgaagctagaaccacctcctacagagcatttatcaaagcccccactaaagctacctccaaagccactgctagacatccccactcaggccatagctgtcggctcctctttggaagccccgggcagagccgccccccagaccacatctgcctctactgctgaagctgcttccaccagcagacagcctggccaagctgctgcctccagccctggaggaggagacacaggaagagcaagacatgatgctcctgcaaacgttgagcttatctaggtgtgagagatggaagtgaaaagcacaccgatttgaactccttggtctttatgtacacaggttttagggcattcattttcatttggctctgtccttgtttcacgtttccaacctattctgagttaatttattttgagttaacccctccccgttgggccaaataatatttgaaaaattgggtaaacatggagtaagattagatttgttattatttcattagaattcattagtgctgtacaatccattacttcctggctatcattttttcaccttcctagacctttgtagttggcaaatcatacatttctctaggtccattaaactcatgcatttttcctttgtgattctgggaagattattaaaccagattccagtgttagtcacaattcaaatactcagaagtgatttgtcaggaaatatttctttcttttttaacccagtaataatgatgagtagcttcatattcccttaacaatttttgggaacaaattgagcattgtaactattcttgcagaaagaaagcctgactttgctaatttatgaggattagcttggagagcacacttcgttgataagggtggggttgttagtaaagtgtcatgggattcttctgtgcaagacttttgagcaataataatgtttctttttagcctcctgattcagcagccaaaggaattgttcctcttacttaaatccattagttttggcctactcctaaggattttaaaaacattattcagatttcatagccatagttttcattaaaaaaattcaaagataagagcccactttcctcattaattatggatgtctacaatattttattttactctgaagaggtaagcctataatatttacctctgtcagctacataggtgaaaaggtgatttcaatgttttaaatggaatactatagaaaattgaatttattgaggtggataacaagtgcctacactatgcgtgtcttgggttttcctgcatattactgatggaaggacccaacaaccctgtgtggtaggcacatcttctctccctctctctctctttttaaatctattttcagtttttagatggtcttttccaatgtgtagggtttaatatcatccacaagttgacaactcccacatgtatatcaccagtccagatttctcctggaaatcaagattggcaaatgcagctacctacttgacattgacactggggtgctaaatcagcatctgaaactcaacgtgtccagtattgagctcctaacattttgtcccctcctcttcaactcaatagctcctgcagtcttccccatctgggttaatggcagctctatcttctagctgcttaggccaaaaactgtgttgccatcctctctggtcaggagtactgtagtagccttcttctctttttttttttttagatggaatctggctctgtcacccaggctggagtacgtggtgtgatcttggctcactgtaatctctgcctcctgggttcaagagattctcctgcctcagcctcccgagtagctgggattacaggcatgtgccaccattccccagctaattttttatttttggtagagatgaggtttcaccatgttgaccaggctggtcttgaacttctggcctcgagtgatctgcccaccttggcctcccaaagtgctgggattacaggctcgagccacctcgcccggctatagtagccttctaactgatctgtctgctcttgagtttacccccaagcttctttcaacacagcagagtgagcccacctgaaagccatgcaactctgtaaaacttactagaggcttcccatctcgtgcagaataaaagcccaagttctccctaaacgacatgtgttgtctggcctccagtggctcccgatatcagctcctacctctctcgccctcactcactcaacactaattcctcaagcacaccaggtctcaaggtctttgtgtttgctttgcctggaaagctcttccctcagatacctgcagggtttagctctctcatttccttcaggtctttactcaagtccactttggaatagtaagggctttccaagagaatgtatctaaaattctgcccccagtcttctgctagttcacatctccctgatattttacattcttctttcatactttttctctttgacatttatcagtaacccactatatgtttcatttatttatcttatccgttgtcttccccagcctacactagaatgtaagctctaagcactttttggggttctgttttgtttacccaagaatccccagtaccaagaaaagtgacttgcatgtagtaggtgctcaacatatattgttttgagtgagggaattaatgaataattaagtagaagctgtgacagacacatagatgacagacatagagatgctcagatctcctttcaagaaaggactctctgccagctgcgagggttattcattcctgcagggttccctggtccctattcttgcaactaaccctggcttatatggtttggctgtgtccccacccaaatctcatcttgaattgtagttcccataatccccacgtgtcatgggagggactcagtgggaggtgatttaatcatgggggccgttatcctcatgctgttcttgtgatggtgagtgagttctcatgagatctgacggttttatatgaggcttttcccccttttgctcagcacttcttgctgctgccatgtgaagaaggacatgtttgcttcccattccaccaagattgtgagtttcctgaggtctccccagccatgctgaactgtgagtcaattaaatctctttcctttataaattacccagtctcaggtacgtctttatcagcaggatgagagtggaccactacactggccaatgactcagcaagacagtggtagccaagggcatcctcttcttggggtggccacaagccagtatctgactaaggggtttgaacagggcttagccatttttacaacacaaggcttcactaacacttgatatatcatcaggagccactggacccaatttaatttttgactgtctttttaaagcagttctaactatttgtaaagactgatattttgtgacttatagtcttattagtcttccaaagaacaaagagaaaatttacttattttttaaaaaatagaataaagtttattatcttataattgccataaggattccctggatcctttcataaatctaagacacatttatgggaccttaatggtttcatttttttctatatcttgaaacattttgctatttcattatcctaaaagttatttcatcttcactcatcagttattcctaactatactaaaaaaggctaaaataagaaaatgaaagaatgatggaattgcctggaaggatgatacaacaatgaaataaatcatcattattccatcatcagttttctcaatacactgcccaaagtattatttcacttttcaagaaggtataagagaagtatggtgataccagctttgagtctctctttttttaaattataactgaacaatattgaaaatttagttttagaatttctgcccgtaatggcaaagagaagaaaattgaggaatatgtttgacgatttttagaaaaatcagaaaatgacgcataggagagatagcaacactttagactctaaagagaatggtgaagttgattgcttaagcagatcttggactatgaatgtccagatgatgatattctagaataattttctctatatcaagatttaaagggtaatttatttatggtttggctgtgtccccacccaaatctcatcttgaattgtggctccaataatccccacatgtcatgggaggtacctggtgggaggtaattgaatcatgggggcagtttttccccttgctgttcttgtgatagtgaataaatctcacgagatctgagggttttataaggtgcagttccctgcacactctcccttgcctgccgccacgtaagatgtgcctttgctcctccttcaccttctaccatgattgtgaggcttccctagccatgtggaactgtgagtccattaaacctctttttaaaaataaattacccagtctcttgtatgtctttactagcttgagaacagactaatacatcatctatactcattcgacagaaataatttcatcatacaatattttgccacaagctcctgggccattccattttgctgaaagaaggtggacagtattctttcatcttttatgatgtttgttccaaaatttatgcgatatgatttgcaagtgcacaggtgttaaaggcaggtgtgtatacaaaggttgattgggaggaaataggtaatgtagaaataaaaaacattagattgattatacaattgatatttataaatgaaaatgttttgcaattatggagcaaagagggtggctcctctcttaaaaaatcttgtgagctattaaagttcccaaacttattgcattttgtagctgcaagtgcaagagttgaaagtaatgatgaactagaacctattacagatgcatttgaaatctggaatccataaatacagaatgggtatgttccaggggcatgcatgacatgcattcaaagatgttgcccattttaggtatatatacttccaaaccacaaaattatagaataaaaatttgggttttctatgttttagtttatattaacattttaaataaattagttttgtgctatcttttatatcttctgtatattatttgtaaaagtcacttgaaattataaaaaaataaaatgggcctatctgatgcagttgataaatggtgatgacttatttttggggcatgctaggggccaatgggcaatctttgttccagaactctcacggggctgacagagactttggtctgcatcagtctgctaactatcctgcaaaagactaaaaccctccctggtcttgctttctcccttttcctttcataagtattactccttaggataacttttgatcctcaaactcagtctcagcatctactcactgagagtcaacctgcaacaaaacttaaagaaatgaagtgactttcccagggccagatatctgggaagtgttggaactgagattccaactcaggtctatgcactcatattatttgcagaagtctgcctggatttagggtcagaactagtagagtcctctagtggtagaactctactagttaccaagaagccttaacttcatctagaaacttcgatttcttgagccatagttttttcacctgtaaaattaaggataatagttcctgccctacacatggcataggattatcacatcaaatggagagcgcagagcactctgtaaattgtaattccatattcaagcataaggtttgatcatttttattgctgttttcttgcatttgtactgtattagttattccataagaccatatgtttctaaaccgggaggtcagcctaacttcatctattgaaaggtccgtcatagtcctcaccatttttctatgtacatttggtgttccatttgatgtcttttctaaggggcttatctttgaaatttttatatataattatttacaaaaaaagatgtagaccctatctatggattctttctgatttaagtttgaggttgtattcagctgctctcacataccttagctattagggattgtagctcagtgtcatgggtgtgaagaatacgtttttcagtttcatgatctcatatcttgctgcttcagtggagaactgagctggccatgacttactctgagctataacatcttggcaaaacagagctctgaaatatacccctattttatttatacttatatatttgactagctactctattaattgaattgttctttagcttcttaatagttttgcttgacaaaaatgttgcgttacgtttatcaacattcaaatattaagaccggtcggcagctggggcagcattccttacagtaattatatgactactagactattccgcaatctcattgcctaatcaaaaggaacagaaaagattacattaaaacaggaaaaatctatacttctattttctctgattttttttttttcctaaaacaaaccctgaagaaaatgattgttttggaggagaggtggaaaagcattgaggcgtgattcccttctgtggtgagtcactttcttcagtttggtttcatattcatttccaggccagcagttgtgaaagttttcagggcattgcctgtgtcgttgacctccattttgcactctacataaacccagttttgatgctggtgttttggaaaagtggttaaaattgtttcaaataaaaatattttcccaaatgttttctattaaattacgtgtattttttttccccctgatatcaagtccagtaacttcaggcaaatttagtgaaattctctaccatctagaaagggatgaagaacttaaaggaaggcagatgaattccttcctttttttttttttttttttttttttgagacggagtctctctctgtcgcccaggctggagtgcagtggcgcgatctcggctcactgcaaggtccgtctcccaggttcacgccattctcctgcctcagcctcccgagtagctgggactacaggcgcccgccaccacgcctggctaattttttgtattttgtttagtagagacggggtttcaccgtgttaaccaggatggtctcgatctcctgacctcgtgatccacccgcctcgacctcctaaagtgctgggattacaggcatgagccaccgtgcccggcctccttccttttaaaattcaaaaatcttaattttaaaaagtcttaactcagagtagtggtttctttaagatctcgaatgagttagtgatagtgcttgaacaaagatccaagacacctgcacttttatttgtttactgacaagatgaagattattcttccttacatggctttgtagattttggtgttgtatccaaagaggaaattgtattaaaatatctgaaaaaactggaaccacatcttcctgctataagatacagattttaaagattaaagatggaaatgttgatagcttcagaataatttattttggacaaggatacatgtaatgcccatgttgctcatattgtatattgtataacaaggtaatatgaatatttcaaactcactgtgctgtttatgatgaacatagcagttaaaagttggtgctattgcttcattcatttacaatttttctatcactccattattctgcttatttattattcttttattattcaatttattattctattcatttatcaattattctatttagctattttattattgttatatattatacatcttatatataatatataaataaatatatataatatataaatgtaaattgtatatatatatatttgagacagggtctggctctgttacccaggctaaagtgttggggagcgatcttggtttactgcaacctctgcctcctgggctcaagagatcctccccctttgtcctccctagtagctgcatgcaccaccacacctggctaattcttgtgttttttgtagagacggggtttcatcatgttgcccaggctggttatttatcttctattttacattatcagtagtaagtcaacttttatcaattatttaatatttattgagcatcttgcaaaaacattctgctaaaccttgggaataaaactaacaagtaatagtccctgctcttaaagaatttcatatataagcctggtcaatatatcgagaacttgtctctacaaaaagaaattaaaaagttagctgggcatagtagtgcatacctgtagtcctggctactcaggaggctgaggcgggaggatcacttgagtccaggagtttgaggttagggtgagataggattgtgccactgcattctagcctgggagacagaggcaggggggtgggggtggggcagtggggagaaacccttcatgtataatttttgttgtattttatataatcacagcaagtcttctcttacatattcttcaccatgttcagtaagtgtccgaaaaataatttgcatttttttttcgcctgctgagaaacagtagggagatattattaattgtccaagtgttgacctagaggaagactctgggctgcagatggctgatttatcatcttcccttgttggcaaatagctgccctagttacagacccagtttccatgtttcttggtaccagaagctcactttgccatcccactacctacttccagtccaccttctgccacagacttgcaaccatgtcctgctgcccagtagaacccagattctctccccagtttgctgaagttttgtgctgctgctttgctgctaaaaccaaaaccccatctgtcatctgctgctaaaaagttgtgccatctccataaggtccaatcacccaaattcctttccaccaccaaaccgtcgagaccagtgtaggagacgctgtaggggagcacgtctatgtctctgccattgactgctccagtgttctagagtgttaacatcataagtggggcacctattccatcttaaattcaacaacgctattgagcacttcctctgtggtaagtactgagctgggagccagggatagcactttgatagatcaatagaatttcagctacatgtggtttaaatagggtattgtggaattttataactatttataccattgcttctgtggagaattacatcaagttctgaaaggtcagcatggcatggcagctaaaaaatcctggagccacatttttgtacttccagctccccactgattatttggctatttactagatgtgtgaccttcagcacgtgacataacatctctgtgccttcattttctcatctgtaagttgaagacaatagctcctgcttcataaaattatcacaaggattaaataagatatgtttgtaaaggaccaggagtaattcctggcatacaggatgtgtgaaatatattattaaataaaaacatttattaacaactcttggaatacaaccttcttttggatgattgagaactgcttttgtttttaatgacaaatggatgtaatcaataaccattatggctatctataagattttaatgactagcagctgttaacttcaaaaatagaaagcaagattatgttgcaatgcattatttttttttattttaaaagcccctcctaacaattacatctaataaagaggttgaagagtgtaggtttttttgcttgactcatcaattcttcaattagtggataatacttgttgtaatttttggctggaccaaatccctgctgactttgttgagtgagcagcttgtttaatactgtaccctggtaactgagggtttcccagaccatctgttcttcatgtgggaaaagcccactgttgtagaagttggcctttacatctcgacactacctaaactgcaggtctgttcatcatcatggaaagctacaccacctacaccgctatccctaatctgcctcaagtgccacttttcaaaaatatgtcctaatgatttatcagattaaacacgtttggctcctttaaataagacatcattttcttgtctaacctcttctgctatcgatgcttttgcatttccacatcacttttgcagttttcagctacatttgtatgtgtcattgtaagtgaatacttactagagctgtgagaggcaatgagggcattttacagagaagaaaactgaggctcaaaagttatgttttcctctatgcaatacaatctgttactgcaagaatcaggattagaatctgagtctcttgattcccacccaacactcattttcctacctaaagtcccctgaggtacagggcttatggttgccaccttcgctgatagtctctgagggtgtgtcactgaccatccatttaccttgaggaggtgctaggctgaaaggtgtacacgcctgcagagatgaagtttatgggtaaaaaacatggttctcccagtttttatgattccttacacatgaaattcagtgttcctccataagttctgtccctttgtagtgatttaaaaattatcaccacatattttatgtttcataatattttattttttgggggaaagaaagaacatctttgtgtatatttgtgttttaactgtgacacaggcagatacagtaatgcggttttataacattaaaattttaatcctttttaatgagtaatattttcttaccttttactctaatttcaccaactttgctttcagatcttccttgtgagacaagtttggtgaacattataattaaacaaaacttcccatgaaatctaccaattttcctatgattctgagaatcatacttgtttcaataaccgagaggcattctgtctttgtcttggtgaattctccttagtgaagtgaatatattttattttctcttcattggcattaaccagtggcataaaattaaacatttttggtttgcgttgcagaaaagacgtgacatctgatagtttgttgctatgcctgcccataagttttgaaatcattttctataaaattgctttttgtggaataactttcaaggggttgagttttttgaaatccttgccaaattcctggggtagtgtgttgagtgggaagaacactggactaataatttgtagacctgggttcaaattctgtactttcactaaattgcttgtgacccaggacaaaacaagtaacatctctaatctggatcttgatctataaatgatcatcacacttcttgtaagggttttgtgaagatcaacttttactttttgtctgtatattaaaatcctaaactaatatataaacgtaaagtataatcactattaaattaattgccagtgtttgttttcttaagttctgtctctagacgttaagaaaaatctatattgtaggtgaagaggaagggaagagtgggttttatgtcttggaagataaatttttatgttagatttaaggcagtacccatttgtaattttgtcttgcatttctgggtctagaaacttaattgtggcaatagattgaaaatactactttctgatatgtttgaaacatgcctatttgcattgcttgaatttcccacttttgctttaatcacctggaaaatggtttcagtgaatgtaagtttttcttaagcttgccctgattcaattatttctcacacaaaaacttcatccctcttctatagtcaaagattccgaacactgttagatccctctgagcctgagtggagatttaggtactctcaggggtaattgtctttattttctgctgaggtgacttctgtagaaagatctcaagtcttttctgcaattaggctttgcatacatgcatgtgccgaagattggcaggaactcagcagatgctaaatattaaagacggtctctaacagagaactcttttttttttgagatggagtcttgctctgtcacccaggctggagtacggtggcgcaatcttggctcactgcagcctccgcctcctgggttcaagcgattctcctgcctcagtctccccagtagctgggattataggtgcccaccacaaggcccagctaatttttgtattttcagtagagacggggtttcactgtgttggccaggctggtcttgaactcctgacctcgtgatctgccctcctcggcctcccaaagtggtgggattaccggcatgagccactgtgtgcagctttttttttttttttttttttttttttgactgggtcctgctctgttacccaggctggagtgcagtggcatgatctcggctcactgcaacctctgtctcctgggttcagccatttctcctgcctcagcctcctgagtagctgggattacaggtgcctgccactgcgccaactaatttttgtatttttagtggagatgggttttcactatgcttgccaggctggtctcgaactcctgacttcaggtgatctgcctgcctcagcctcccaaagtgctggaattacaggcatgagccaccatgcccagcccaagagaactcattttaaggaaggatggactccattatgagctgtatgtgacgacagagcctagatgtccaagggtatggagggcttgagtgtggggtgctcatgcatgctggcagttgggggtaggacttgtaggggatgaatgtgctgaagtgaaactccgtactatcttggggctctgcacaggagacctcttctgcaggaaagggttaactcagcaggcttggggtgtttagatcttgcacataccaaagaaaggcgtagcccttacccagctcttggggaaaaagctctcagctttggaatattctgcctgataggagtgtctttgtatacctggggctttaggccacggcagagagtttatgctaacagtgtgacttatagtggcgttcttgggctacgctgtatcagtttgacttctggaggggctgcagactgagtaactgaggtgaaccatgtgggcgtcccatacctaagtgactgacccccaataaaaactctggacaccaaggtttgggcaagcttctctggttgacattactatgtatgcattgtcacacatcatttctgggagaattaagtgctgttttttgtgactccatgtgaaagaacaattggaagcttatgcctcgtctctcctggacatggccctatgtgccttttgcctttgctgattttaatgtgtatccttttactgtaataaaccataaccatgagtataacatttttctgagatctgtgagtccttctagtgaaccattgaaattgaggatggtcttgggggccccaacatacccctatagaatggagctcagaaaaagtagaagggtgtttcttttctccctttttggatagaaacttccaagtaattgtagcatatcatgagacttgagagtatcagtggcctagtgcagagcattaaattatagtggaaaagactggtagccagaggttttgtatgtagttttttataggtggcaactaaataactagaaaaattaaattagtgcatcaatgttaagaagacttcatggatccctgtaaactggtggagagtgaggacttctggttatgtttcagttactaaatcctctaggtaatttacaaattatagccatgctctcttaggtatataaatatacctctttccatattaagcagaatgccctcaagaaccaatgtggttacatttttcttccctttttggaaagctttcaattacttcctacctttgacactagttcaggcatgttaaccaccttgccacatagaacctcccatctgagcaggaaggtttaggctgcaatgagtgccgtgttcctgcaggtataagtatcacagaggacaggattaggaacagtgctctctgtatgttctttgtagacttgccattttggcaacacagtcattggaactaggtcattttctcctgaatatttttgttttaattggctaatttattcaactcattgtctgagtcttatggtaaagtagggagaattgtcattcacctttaagaggattgataaggctgggcgtggtggctcatgcctgtcccagcactttgggaggttaaggagggaggattgcttgagcccagagatttgagactagacaaggcaacatagggagaccccatctctacaaaaataaataaataagtaagagaattgataagatgaaatctctcattcttcttactagaaatgcctctgaatcaaccacttctcatggggcattagtttcctcaaggggaaatgacacggactagtctctaagctctcttttatctttaaacttctctgataacatacaattaatttttaaatttttatttccttttcaccgtagtagctacattgattgagggtttaatatgaaccagacactctccaaagcgcatagattagatatttaatcatcacaccaactctctgaataggtgttaatattattatcaccattttacaggtgaggaaattgagagacaaggtaatcagataacttgcccaagaaaacacagctagaaaggggtagaaatagttttaaatccagaaaattcgaggcttgttcccttaaccactcttcagtgttgccttctctgacaagtaagggactacattttctttagcttgatatattcctttgatgcattaataaaatgaattagaggaaaaggtccaagccatggtgctctgacctgctcactgaggctggaaccactcagctgtagtctgaatcctcataggactaccgctcctgatcacattctcatgccctggaaattgatcacctggaattgtggaaatagttctatgtacaaccactaggccattcctgaggctacaaatggtttctgaaatattttctaagacgtgaataagaaaaaagcaagggaaaatgaataaaaccaggtgtgatatccaaaatagttaacaattatatggcatggacatggatgagtcagaatgaatactagcagctggtaagtctggactggggtcctggacccccccccctgctgtgcctagcatgtttggttactgatggtgtacagggggtcatgggcaagccctgcggccatcgttgaggccattcagagggcctctgggcagtggctacttatcagccctatgagctattttggtattttattatattatttatttatttagagacagggtttcaatctgtcgcccaggctggagtgctgtgctcactgcaacctcgacctcacaggttcaagcaaacctcctgccgcagcccctcaagtagctgggacgacaggagcgcaccaccagtcctggcttattttctgtattttttgtagagacggggttttgccatattgcccaggttgatctcaaaatcttgagcataagcaatatgcctgccttggtctcccaaagtgctaggatcacaggcgtgagccactgtgaccggccaattttggcattttaatgacttgtgccggcacctttgtggcccttgctgtaactttgtacaaattagaagaatatgcctcctttcctgggccctcagcttggaacatggagtgtgggctgggcaccttagtgcagggagtaacctgccaaacctcataggagacctttgtaataaatattctctgttgagagtggaaagggaagtgcatatcagaacttctagtagggctgggatgctgtttccacatttaccccaaagggacatacattcagctgagctgctttataacatgatcagcaatggtcattctttgcagtttggctacgttactacagaatggtttctagttatgatacagattatggcccaaatttttgcctacattatctcaggaaaactactgtataatctgtcccttttccctgattgattatctgattgtctttaatagatgcctttggatatttatgaagctaagtatggtacagggtagagtaatcctagtttattttggtactgaagagcttcaataattaattatttaaattccttttagggtgaatctgaataaagtctttagtttagttgatagtactgtactagtgttaattcttagttttgacaaatgtactgtagttacataagatattaatactagaagatattggataaagaatatgtagtaactctctactgtctttgcaactgttatgtaaatctaaaattatttcaaaataaaaggttttaagacaaaacaaaacaaaaattaaattccttttaggccttaggtgctgcttcgaattagttttgatacaacttgagtcatatcattcattaattcagctctgagtctagtactgtgctaggtggtaaggatttgaagatgattgaaacagcccctgtttgcaacagcttacactgggccaaatcatgagatgaatggataaactggcaattccaacacagagtgaagatacggtccaaaggtgctataggatgggtgttctgggaggacccccacaggagaatgagtagaaaccttcacaaacagcccatgcttccaccatatcatgtgtaggttactgcaagagtcccctgcatccacttcagccttcctgcattctccgcactgcaagtggagtgatttttccagaatcatggcactctggggtctgaacatacccatggcttcccgctgaactttgaatgaagtccagattcctccatggcctcatctgatcctccctcttctttgctcgctctgctccggccactctggccatgcttctatttgtgggacatgccagcctttttcctgccatgctgggatctgtgcgcaagctgcctgcagagcttcttgtgattgattccttcacatcatttgggcctcaactcaaacgtcacccctctgagaagtcttcagtgaccacccttttcaaaggagccaccccactcctgtattggtcatgtttttaattttctatattttatgatatttcaatacctccaaaacttgctggctggggagagaacgcccctccctgtgctagccaatttttagaggtagcaaagggctcagccaggagcacgtctttcttccacaaaccagttaatcctgagtctagagctccaaccacctccttatctaattcacacaccaagccatatttcccctgccttacatcaccccagggccaggtaccaggcaccttatagaccaaagcacactggaattaattcaaaccagtctgtcttaagctgcctaccctaccctgccttggctctcccgtggaaaccccaataaaggctctggtctaggctctttctcctcattcctttctgcctcctggcccacatcggtgctccccacgtggtcttgcacagaatgacatgcttccttctctgggaaacgtaagtaatacaaatctttagtggcactgtcccctctgtattgtcactcagttgtgcctgtaaattaaatcccaggtatcatcttaatacacaagctccatgaaagcaggggccagtttgtctggattcccctagattcacactcccataggattgaagtgggcactgtattgatatctgttgaccaaactaatggataacagacatcagtcatcctttgctcaaactgatgtatccacatttttctacaaagattaaaggagaaatggaaccgagttggaattatttcacacaaaaactatgaatacacagtttttagttaatatttgtaagcattctccaaggggcagagtgataggtgttttaaaagaacaaatcagaaatgtttgcagaataaaggtggtgactatgaaatatcaatttcaatgctatcttccaccttctcttagattatccctaactgaatatacatccaccatttgggcagttttattacctgtgcaggtctatgcggatataactttaagcttaagtaaggacagatgcaatattataagatttggtttccctatgaagtaagactttatctagtaagacattaatgtaaatacctgaaaatctcataattgctatgaaccaagaattagcaatgacagaagccacagtggcagatggaagagaaacagctttgctagggagccatgaagacacactggctacactgtgttagtggaagctctggaaacatctccagaaagttgttttctttctgcaacatagtaattattctatttcaaaaatcactttccaaatgaagtagttctattactgaataagagtcttatttttgagaacattcttgattattgttattaaatggatgggaacagtggcacagaacccaaggggcataaaaccaacaaagtgttttctatttggcggggaatgtcttttatgcacacatttgttggggctgcattgtttgctctgggaactcaagacaaacaatgcaaacaaagtctcctgacttaccttaactctcctccctcctgggttcctccgacccttttttttttgttttgagacagggtcttgctctactgcccaagctggagtgcagtggtgtgatcatatctcactgcagcctccatctctggggctcaagtggccctcccaccccaccctcccgagtagctgggactacaggcactccacacaatgcccggctaattttttttttttttttaaagtagagatgaggtcttgctatgtgacccaggcttgtctagaactccttacttcaagccatcctcctccctcagcctctcaaagtgctgggattacaggtgtaagccaccgcttccgtcctaaccctattttctaattcatgtctatctgcatcctcatccactgctcaatgtgttcctgacctcgggtcttcattgtctgcagagttcttctttctgatcgactttcaaggtatcagtggttacctctctcctatgcaatccaaaacctcccctcctgctccaattctttctcttagaaaattgattgattgttctcaccttcgtgcttgtgttctaagctaaactcgccacctttccattccactgaatcccttttcagtttgctgcatctctcaatagcatcgttattttctagtcattagtcactttctttacttaaaatattggtattatttttgtcatctgcttaaaaatttttcattgtataatttcctgcatacaaaaaatttagaaattgtgtagtttaaataataaataatagtaaaacatacctgtatcttagagaccctgctgtttctccccagtgatatctcccctattactgctcaggtgtcatcactatcctgagttttctttattacttgctgtgaaataataagaaatatatagttggcctttgtctctatttcctggcacacagcttctaaaatccttgtaatttcctcagtgatagaagcatcttttcttgtcctgacccagagctcctaaatcctttgaaatttcttgtgtgataggagcatctttggttctaatgaggtgactcttggtgggccgctaagtagctttaggatgggggctggctgccagaaagaccaaaccttgatgagaagcctagacatttcagccctaacccttccccaccctccagagaggggacagaggctggagactgagttaataatcgatcatgcttacatgatgaaacctcaataaaagcttctaaatgagggggttcagagagtttctggattggtgaacacatcaaggtgctgggaggtggcccacccggacagggcatggaagctccgtgttcctcgcccctgaccttgccccgggcatctcttgtattcagctgttgctgagttgtatcctttatagtaaacccacaataataagtaaagcacttacctgagttctgtgagtcattctagagaattattgaactttgcggagggggaggttgtgagaaccctgaatttgtagccatgtcagacagaagtgtgggtaacctgcgggcctgatacttgtggctggtatctgatgtgaggacagtcttgtgggactgagcctttagacacgtggagtctgacactaactccagggtgttagtgttagaattgaattgaattgtaggacactgagttggtgtcagaagggaagaaaacctttcacctgcctttaaaaaaggttttgctatctacatatgcacctctaaacaatatcttgtttagtttttctatttggaactttatacaatggaatccgccttatgcactctgctgggacttgcttccttcatttggctttatgattctgtaactcatcattgttgatgtgtgcggcagttgtaggttgattctctgggaagcagagtcagagctgagttcagtgtgcagggtgcttattaaagattgccctgggatcaatacctgtggaaggggagaagaaagcaggattgggcacaggtagaaagtgagcttccatgaggagctctggagctcagtattgtcctgagtggggccaagatggccaagcctttatacttctgtatcaattattcattggatgtagggtgtgaactcaggtgaggtgacactgcagctgaagcaacccctgaggggctgatggctgaggactgcctgctgccaatacctatgcagctgggatgaaaagctctccattggaagcctgctggatctgggtagccagtgggatcacagcatcaccacaggggtttatagtccattattttccactgttggatagcattttttgttatagacttcactttatttatccatcctaccattgatggctagtatttggattgttcctagtttttaactactatgaacaatgttgcatgaacattcttggacatgtctcctggtgcacctgtgtaagggtctttccaagttttagacctccttaatctgtttggtctactgtaacaaaatgccatacactaggtggcttataaacaacagagatttatttcccacagttctgggggttgggaagttcaagatcaaagtgctggccactttgatgtctgatcagagtccacttccttgttcatagatgtcaccttctgtgccatgtaacactgtgtcctcacaaggtggaagggcaagggagttctctgggtctctttattaagggtaccattctcaatcatgaggcctccacccttatgacctaatcacttcccaaagaccccacctcctcataccatcacctaggcttccacatagaaattttggaagattgtaaatattcaacccactgcatagaatatgcatatatccaagttgattaggtgaaaccgaattttcgaagttcagagttacaacctcacaaaagtatgagtttctgttgctccacatactcatatatatttgatacaggaagactttttgatacttgacaagttgggaagtgtgaaatggaagctaactgtgatttttaatgtgcatttctctggttactaataagattgagtatatttcatgtttattgaatgtatggatttcctcttcagtgaggagcttgttcaaatttttgtgccatttttaatagggctgtctctttttatcctttatcctcttttatgcttctcttaagcttatctatgtgtctatccatctatctacttacctacttacctacctaattttttctctctgtgctgaagtctggataattccctcattctacttttcagtttactaattctttctcccactgtgtctaatctactattggatctaaacattgatattttaaatgttatttcttacctatatctagaagtttatatttggttcttttcaaatatccttagtcattcttcatagtgttttggattctgcttatattttcaaagttttagttttaaaagtatattgatcattttttatgctctatattttaaaattgtttctattggctcttgctcatagtaacttgtttagcaatttctgattaccaacagctaattttccttaaaattttatttatgagaatcatttgaggcctgggatgatagtgggtctatctaaagagaatttgcatttgcttctgttcggcccccagggaggtaccagtggttgggaaccctcttaaagtaaattcccagcttaaagttattttcatgcagcaagatagtgtggattttggccataaccctatccaaagtttagcttgtaaccgtatattctcagagttaattttccctcttctctttatgccagtggttgagacagggaactttttttgcagttctctggcagggaggtgagagtatttctaggtcatgcttgtattgcatgtatggctttttggggctaacacttataaggaagggtctctgtttatactccccatcttaggcaggtgctacgttttatctcatgtccttcatactctgtggggtcataaacactgaagtccaagttcacagcttcagcaaatgcctcaaagtgcaagccatcttcagatttctccttttctctctgagttccttccttcacgtagtgtttggtcagggttttccttgttattacagctcattaatttgaagtcctaattagggaaagggagtcaggctggtggaggcaggaaaaagcaaaaagataaagcaaataagctacaagtctgcctttcttcatggtccaggacacacagccctcctgcgcaaataattcacaatcttcctgcacccaactatcaccagacacctgcaagttagctcactacaagctttgcattatcaatactaaacaaagccctcttcagcagacagcataaacaccatcctataaaatctccagcaagcctttctttgcagtcagcttctcttcttctgatcctgcttgttgcctcctcgcaatgtatttcctactttctctaataaatctaccttttttttttttgagatttttttgagacaaagtcttgctctgtcgtccgtggtggagtgtaatggtatgatcttggctcactgaaacctccacctctcagttcaagtgattcttctgcctcagcctcctgagtagcagggactacaggcacatgccaccatgcccagctaatttttatatttttagtagagacggggttctgccatgtaggccagggtggtctcgaactcctgacctcaagtaatccatctgcctcggctcccaggggagagattaagggcttgagtcatcttgcccagccaagtctgcctttctttatctactactctcttagtaaattcttttacccctgtgccaccggcccccttgttgctcccttgcatcaattaatgctttttttaaaatttgagacagagtctcttaggttcaagcgattctcctgcctcagcctcctgagtagctgggattataggcatgcaccaccatgcccagctaatttttgtatttttagtagagacggggttttgccatgttggccaggctggtctcgatctcctgacctcaggtgatccacacatcttagcctcccaaagcgttgggattacaggtgtgagccactgtgcctggccaattaatgcttttaaaaagattttaagaggattttatccagcatttttagttgcttccagtaggagaaccagttgaaaccaagtctcctgtatcatctcttgattctcctttttacccctgtgactgttcctgttgattgttcttcatagattttcattcctctacctattgcttaactgttgatattcccattttagaacatgaccccacttcttttttattttacatatgtacatttatcacattcattctctttaatataatttttccttcagtaaaacttaccgactctctactctctaatggagataactggtagttcatcccatatgaagactggcttctggtgagacatcccaggcccctcaccttggaggacacaggaacacagggctttagccttcccagcgagcctattatgttccctttctcttcagggacctgtccatgtctctctacttttctcctctgccattggagaaatacgaaaggtcactcaggggcctagagtctcttcattcaggccaagactttcactcttcaaaaactcataattggaacaatcactggggaccaagttggtgcaaggcacaggctttgctgtatgatgagaagctggtcaaggatgtgtagcgtaagctctccttcttttaaaagcttacagactagttagggagagggagacacctgactcatcacagctgtgaccttttatagttttaattaccaactttagtcttacatgtttccaatataaaatacttcttctggttttgatgtgtatatttattcatttattgaacaaatatttaatgtgtacctaccatatgccagacactgtctggttactggggatatgatgttgaacaaaatgggccatatccctgccttagaaagcttacattctggtgcaggggaaggaacaacaaataaataaaataaataaacaagataaattcaggtgcttatgaagtttccgaagaaagtaaggcagtgtgatgtactaatgacttctgctagagtggtcagggacagctcttctgatgagaaggatcaaaaggaattagccatgggaagatctggggaagagcatttcaggcagggggcacagctagcgcagaggctctgaggcaggaatgagcttgctgcatccaaggaataagaggagggcaatattgttagggctttgggggaggtgagggcataagatatgaatagagagataagcagaaccaggtcacatcaggctctggaggccatagaaaaatatttaaatttagtcctaggtacatcaggaatccactggaggattttttttttttttaaaacacggtctcactctgtcacccaggctaaggtgcaatcactgctctctgcagcttcaacctcctgggctcaagcaatcccactgcaggattttaagaaaggtagtgatgtattcatctttctctctgtctgtgtatataaagagattaaccattgtgtgtgtgtgtgtgtttaaagtcatctttgttggagtacaatcatgatgtgctggtaaatgtgtaataaccaggtttcagaggaggaagaatttctgatttgtggggtttgctaatttctgcaaaagtgtaaataccttctccatgctgacatcaagctaccaagtgatatcactaagtgaggggtcaggaagagacgtgcagaagaggctgtcatgagatggtaacagttctagcacatgactgggtgtattacaaacatattaaaactcactttttaagttgttcatgtctatgaatcgtgacatatatagctgtgtaaggatttacatatggaatcatcactctagtcaataagtgtattagtccattttcacgctgctgatgaagactgggaagtaaaagaggtttaactggacttacagttccacataactgggaggcctcaaatcatggcaggaggcgaaaggcacttcttacatggcaagagaaaatgaggaatatgcaaaagcggaaatccctgataaaaccatcagatcttgtgagacttattcactaccatgagaacagtatgggggaaactgcccccatgattccagttgtctcccactgggtccctcccacaacatgtaggaattatgggagtacaattcaaaatgagatttgggtggcgacacagagccaaactatatcaatgagggaggatttgatgataggcggggaaaagtggtgtaaattgcttcagcacttagacaattacaagattttttttctaagtggaatttttctctgagattgtaatatttttgtttcacataatctaatggggaacataattaggcctgtggctaagattgtatcagaagcaggcaataaaaacaattcagggataattacaacacacttaaaagactctttttctgctttatattttcacttagaggcagaaaccattttttttgaatagattataatatggataatccatccatacaggatagagggtcaactaaatatctagaggtaatatctgatctgaggaaattatgtttttaattaatctaatttatttccctttagtagagagaaatctattggtcaagagagttataaacatcagctacaactttgtagtagaagtggatggctctattcctgtaacttggattctaaactaaaacttttgctataacctctattacatttggaatattgtttaaaatatatatccaaaaggaaaatgaggttgagaattaatcattataaatattgagtattaaaaataagtattagcatctgttgaatgcttatcccataagtgcactttgcattaagttatttctttaatctttacaataaccatttgaaagaactacttttattatccccatttacagatgaagaacctgaaatgtatatactttagttattactaaagggaataggcttcttagtatgtcaaaatatggcagattggggatttaaataaaagtacttttattctttctgaatttgtttcagtttgaattatagggtaagccttatgaaaacctatgaggaaatctattattttgaaagagtttttatataataaaagctgttagatgttcacatatttatattgcacacataaacattctaaagacagtatcaccaatgataacttgctaaagaagaggtttattgaatacaaagaattgacaacagatttctgtaggataatcaaatgagtcatatttgtgtgtggcattcttctagatgaatggggagatgctgtcattgattgcccagaaagaaagtaacagaaagacaacaggttagacatttttcttagacatgcacatttttctggacagatacataatgccttttcttcgcaggggctatgtggcatacgttctctgttgcatctcaaattaattgctttgagatttctcttccagggagtggagcctggtggtaagtattttgctgcgttggtctacctcctcaagaactttcttaaccactatggctttggctgggtctgagcattaaaaattaaaaggagattttatgtagttaaaaaaagaataaaaattatatcatttaaaggaataataggatttgcatacagaatgaactttgcactaagcacaaatacttagactcatttttggtgaataattttgattatttggttagaaaaaacatggtgacatgttattttgtttaaaattagcacaaatcactaatattagacatctagcacatatggatatctactacaaatctttattgtatgtattcttaccaagccatggtaatataagaacaatcaagctatgcattaaaaatgaagtagttgggtatatatacccagaggaatagaaaacattctaccataaagacacatgcatgtgaatgttcattgcagcattattcacaatagcaagaacaagaaatcaacctaaatgcccatcagtgacagactggataaagccataaacaccatggaatattatgcagccatgaaaaagaacaagatcatgtcttttacaggaacatggatggagctggaggctatcatccttagcaagctaacgcaggaacagaaaaccaaacaccacatgttctcacttataagtgggagataaatgataaggacttatgaacacaaagaaggaaacaacagatactgggttctacttgagggggaagggtgggaggaggaagaagagcagagaagataactattgggtaccgggcttaattcctggatgatcaaataatatgcacaacaaacctccgtgacacgtgtttacctatgtaacaaaccttccaatgtacccccaaacctaaattaaaagttaaaaaataaaaaattagcattgcacaacagatttcattttaattacctttgacttgacttcccacatttccagatccataatctttagacttgtaacccccagacttacaggctctgtgaaaacatcgcaaaagagggtgatttagagagaaccccatcaattctaggatcaccatatggttttctttagctctttggtagtttcaactgtgtaacccagtatttgatttatagtgtttgctgatttctgtagaggtatgaataccttctccattgctgatatcaagtcaccaagtgacatcactaagtgaggggttaggaagagaagagataggcagaagaggctgtcatgagatggtaacagcagttctagcatgccactgggtgtatttatacaacttaggttgaaattcacccttttaagttttgcaggtttatgaattgtgacaaatttatatagctgtgtaaggatttacatttggaagcatcactctagtcaatgagggagggtttgatgataggtggggaagagtggtgtagatcgcttcagcagttaggcaattacaagatacttttcctaagtggggttttctctgagactgtaatgtttttgttctgcttcagcattaagaagtgatttttttttctgtatgattccttttatattaacatcaagaatggataaaataataactgccaagggaagtggggcacagaagaactttctggggtgatgaaaatgatcttcattgtgaattcaggaagcttcctgctcctaacaaccctgagctctagacatccagacttgtggccatgggactttatcagtgctatgaagacaggattctgtgagtgctgagctccagaaaccatttccagagtcagaatcctggtccacatattgaaactccatttagcctcccgtttgttcttttcactctagaagtgatattttcaatgttcatatcttgaactcggtgcctgctgcatattggtttaagatattaatttgtattttggcagttgagtatgtattatatttaatatttagtattcatgataataaatgcatgcagccaaattatgtccgctttccagtggaaagtgggatctaagttgcaagcagatttcagtatattacgccatctatgcagattattttacctacccatcatctcctcctataaggagacagtaggtctcaatttctttttccaggtggagcttgatgtccaggagctgctcatactccagcttctggccctcggtctcggttctgacctggtgcagctgctcctccagggccccgatctgagcctggatctgcgccagctgcgcacagtagttgctctcggtctctgtcaaggagcactccagggagtgtttctgtcaggaagcaataaagagaacttgaaatggatatgcagatatgcagggatttctttgatacatgattttctcctgctgttaactttacatataattgtttcagatttcacatggacacatagttaagactctgtgatactgcttgaaaatgagcaaatccttctttttagtagaataaacctaaagacattcgtgtagttttaggtgtcagctatacaatcctattctttccttatgttttgagacaattataaacaaatatatttcaatattgttaaggtttttaaaaccagctggcaagtatctaacatgatgacctgggagatggtgaaaaaaaattgttcttttcataccgtggctaggagagactgaagttcaatttccagggtttgaagagtgcgcttcatttcagtcagctcattccgggctgaggttgtggctccgacatcctcagagatctgctgctgcagggaggcgctctgaaatgacataagtgaaggagcaaatcttagttttgtgaataccagtaacatgcaaagggaccgttttctggaggagagtcaccttctcgttgaaccaggcctccgcgtccctgcggttctgctctgcaagggcttcgtactcagctcgcatgttgttcagcagaactgtgaggtccaccccgggggctgcgttcatctccacgttcacgttgcctccagctgcgcactgcagaacttgcatttcctagaggcagaaaagtgttctgctcagctctgcaggaatctcatggaaagtctagaagcttagctttggaagggcacttagagttcgtctggttttcccctcccaggctgtgcattgaccccctcccaccacatttgatacttcctgtcccgttgacctaattctcaaagacggtgaactcactaccttatgaagtagcctgtttcattctgggagagttttaattgttccagagttctttattatagtgagccaaactcctgctcttataacttaaactcatcagtttcagttctactactcagaatgcatcttaattccttttccatatgaaagttttaaacatttaaaatgaatggtcctccatcgcttattctattctcggcctttgtggactggtcttccttccactagaggccagctttggtgcagtgttaactcagctacaccctgagcacagccatgaacatggttgaagggttgagtatgaataattctgaacaattgaaatgatgataaataaataaatgtatgtgtgtgtgtgtgtgtgtgcgtgcgtgtgtgtgtgtgtgtgtgtgtgtgtgtgtacccctcagggaagaacatcatcccctaaagaatcccagctgtctattaagtctatacagggacattacagtatcatgttggactttggagtcacgcagatctctctgaattttggttctgccctatagtggctagtgagtttgggaaagttgcttaacctttttacgtttctatttgcttatctgaaaattgaggataattaaaaacccttctctgagttgttaaaagaagtcaaagaactaataataataataagactccgtgatactgccttgcacataaatgctaaatgaatgctggttattatgattattatcatcatggaagctggaatttattttgcagtcaaagtctacatgttaccctgtctgaactgcaagctgttagaatgtgtgagtcagttctaagattgtgaatggtaggcatcgctgcgaagactgtgtatattggaataccacccatcagcttatgtctgctgcagaaactctcctccccattcatgaattggtcttaatgatggtaactaaggctttcattcctccctgcagcgagcccctcagccattccagccttctttcctcctggttgaaactatgtcttcctgatctacagatgtggcttttacttctgaggatttagtgaaaacttcctggttcaagcataaaaagaaaaagataaaaaaagatatatgtatatcatctatatctatatatctatatctatatctatatctagggttgcctgtaaatgaggcattacaaaaatcaattgcttttgattcatcaaaaattgattaaacaccatgggctgtaactatatttgaatccacgtagtcaaatcaatgttattcaagtagttatatttataagacagcctcatgactaatcaagtaggattcttagcttgatcttctgttttaagcatttggcttgaccatagaagtcttttggctatttaaaatatcaaatttattttcaaaggataaagatttttcccttttggaaaacagtgcctctgaaagcaatcctaaagatgtaattgctgcaatataaaatttggaacttagcttccaacagtgaccactttggaagtttatgattaagtgtaaattctggtataatagtttaacttcatgctcattatttttacagccagacctattaagaatatgtactagcgttaagtatgtatacttaatgtgtgtatgaagtaaatgttttagtgttttaaatctgccactgtcatttagaaattgagatctagttttctagtttaaggatggccttaaagtatatttattttatatttattttatctaattagacttaatgtccaaagcggatcattttaacttagttataattacacagccaaacactgctcttataaccctgattggtctggaaaacatgattcgtttttttttttccccataggaaacttgatgagagagcaagggtgaatctgtacaaagaatctgacacttaaaaagacagctcaggccgggtgcggtggctcacgcctgtaatcccagcactttgggaggctgaggcaggtggatcacgaggtcaggagatcgagaccatcctggcttacacagtgaaaccccgtctctactaaaaatacataaaattagccgggcgcctgtagtcccagctactcgggaggctgaggcaggagaatgccgtgaacccaggaggcggagcttgcagtgagccaagatcgcaccattgcacttcagcctggacggcagagcgagactccgtctcaaaaaaaaaaaaaaaaaaaaaaaaaaaaaaaaaaaaaaaagacagctcagccctcatgtctgtctgacaatgtgtcttcagcaccaactttttatatgagaggttatgtacattatctcctgtcaggtgcacagtgtctgcggagggatagcaaaatgtagacgaccagctcttacctctttatggttctttttgaggtaagtcatctcctcactcagggtttcatactgaatctccagatctgttctgcacagggttatttcatccaaaactcttcgtaacccattgacatcagcctctacactctggtgaagagccagctcattttcataccttaaagagtgttaatgatttcctaatttgtcacatggttggagacatagtcactagtcactgatcaatgacaaatgctagcattctggaattttgaagatttggccacaagaggcattttcaaagcttgttgtataataattattgtttctactttgcagtatttgacagaaaaagaactagggtattgggcgctagttttaatagcagttcatgctttgtatttaatagtcaaagcataaaaaagtaataacatcctgtttatgtgaaattcaagtgttttataattttggaataagagttgctaaatttgatgtaatgcgttgcatgaattgccatgaattcatttcactctggcagtctacttacttgagtctgaaatcatcagctgtaagcctggcattatcgatctgcagaacagcattagcattgctggtggtggatgcgatgatctagaaatgggaatttgacttttatcatgaagtaaaccaactgaatctacttaatgcttatttctaatgctaaattggaattctctttaagaaatcacaagtaggagggcatggtggcaggcacctgtaatcccagctacttgggaggctgaggcaggagaatctcttgaacccaggaggtggaggttgcagtgagccaagatcccacggttgcactccagcctgggcaacaagagcaaaactccttctcaaaaaaaaaaaaaaaaaaaaatcacaagtaggaatgataaatgtttttagaatttaataaagaaaggaaaacaaaatttagaaataaaggtacatgaaaatgattgtgcagtatgatttcttacctgatttttaaggtcatcaattattgggaaatatctgctatagtcatgatcaagaccacggcaagagccaggcccaaatttctcataccagcccttgatcttctgctccaggtcagcgttggcctcctccagagcatgcacactgtccaggtaggatgccaggcggtcattgaggttctgcatggtcaccttctcattgccagaaaggagcccccgctcattcacagtgaagccagcacagggattacctccccctgtgtttcctcccgatgagctgcctccgaaggcactagagaagccacttccaatccctgaaatgccacaagaatttccagtaccaaagctggttcccccaccatagagtctgagtgatccagtggtgggacgaggacaggacctcctggatgcactggaaagtcgaagagacatggtatcagggcaaacgcgttgcagagctgtatttgtgaaagccagaatggagtgccttcttgtctaaaaggtttggtttgcctttttataggcaagtcccaagtgtgttctgaatgaaattctgcctacacagagtaaaacatggcttgccagtctcagcaagttggcataattgggtgattttttctaattagtaactcactttgctgggctcattcctgtaggagggcagttgccctcaggttggtggttatctgagaaatgggtctgggtggagcaatgtcaggttcattattacgtttttaaatgctgagtgagtcattcttcacttccatccttggaagtaaacctcatcagctcattacaggatagaaatttagcatcatggttttgggctattatgccaaggcagattgtgatgtttctgaggctttttctgcttttattttcacaagtttttccacataagtagagaatagaactgtaatcatttccccaacctggttcttcaaccaataggtttttgtttttatttttaaattcctcttgccactctttcccatgggaagttaacttccattctggctgacatgagcatcatattctgttgacacttatgactgaggagagttgtcttaccttatccattttggtaattaggagcacacccctaattggtgttatgttttgtgggagtttggaaagacattaacttatttcctgaccctgcaaaatctgaagcaaacctggtaggaactattttttctgtcttaatttattgtggtttagctcagatgaaagtcatcagtaaggtatttagtcggtgggaattcacatatatttactgaaaactctacctattatggaaatataaaaaattgacaaataaggccaggcacagtggcttacgcctgtaatcctagcactttgggaggctgaggcaggtggatcacttgaggtcaggcatttgagaccagcctcaccaacatggtgaaaccccatctctactaaaaatacaaaaattagccaggcatcatggcgaggtgcctgtaatcccagctactcgggaggctgaggcaagagaatcaattgaacctgggaggcagaggttacagtgagctaagattgtgtcactgcactccagccagagtgacagaatgagactctgcctcaaaaaaaaaaaaatgagaaataaaaattgtatatatttatggtgcacgacatgattttttgatatatgaatatattgtgtaatgaccaaatcaagctaattaacatatctattacctcacatacctattttgtggtaagaacatttaaaatctactttcttattgttattaactatagtcaccatattgtacaatagttatcctgaacttattcttcccacctaaatgaaattttgtattctttgaccaaaatttccctagtgcacttccctgatgattagtgatgttgagcaccttttcataaacctattggctatttgtatgtcttttgagaaatgtcttttttttttttgtttgagacggagcctcactctgtcgccaaggctggagtgcagtggtgcgatctgggcccactgcaagctccgcctcctgggttcaagccattctcctgcctcagcctcctgagtagctgggactacaggcatccgccaccacacccggctaatttctttttgtatttttagtagagatggggtttcactgtgttagccaggatggtctcgatctcctgacctcgtgatcctcccacctcggcctcccaaagtgctgggattacaggcgtgaaccactgtccctggctgacaaatgtctttttaatcacattcttttcttgttattgagttgtttgaattacttatatattttggatattaagccttgatcagatgtatggttcatagcatttcatccaacaggttcatccatgttgtcacaaatgacagaatttccctttttaaaggctgaatagtatcccattgggtatatatactatattttctttattacttcatttgttgatggatgcttaggttgaatccctttcttggctattgtgaatcatgctacaatgtgcatggaatgcagatatctccttgacatactgatttcgtttcctttcaatactcagtagtgggattgttgggtcacatggtagttctacttttaattttttgaggaatcactatactgctttccataatggctgtattaatttaaatttacacaaacagtgtacaaggattttctttctccactttcttactaacacttgttatttcttgtcattttcataatagccattctagcaggtgtgaggtgatatctcattgtgtttttcatttgcatttcattcatgattagtagtgttgagcattttttcccatatacctgttggccattggtatgtcttcttttaagaaatatcttttaaaatgggttatttgtttttgttatttttgttgagttgcttgagtttcttatatattttgggtattagtcctgtgtcacaagtgtgcttcacaatattttctcccaatctgtgagttatctcttcattctgttaattatttcatttgctatgtagaagctttttagtttaatgtaatctcatttatgtattttttcttttgttgcctgtgtatatggggtcatataaaaaaatctttgcccagactaatgtcaagaagtttttcccctatgttttcttctagtagttttacagtttcacgtattatgcttacctgtttaatatattttgagtggattcttgtatatagggtgagataaaggtccaatttcatttttctgaaatatagtttccccaacaccatttactaaaaatactgttctttccccattttgtgttcttggcacctttgtttgaaaatcatttggctgtaaatgcatagatttatttttgggctctttattctgtgtcattggtctatatgtcactttttgtgccagtgttgtgatgttttgattactatagatttgtagtagattttgagatcagatagtgtgatgcttcaactgttctttttgctcaagattgctttgtctattcaggatcttttgtggttctatatgaattttagaattcatgtttttttctctttttgtgaaaatgtcattggaattttgattggaatcacactgaatctgtatatcactttgggtaatataaacattttaacaatattaattcttccaatccatgaacatggcatatgtttccatttatttttgtcttcatcaacttatttcatcaatgttttatagtttcacttatttctcttctgatccttggtattttctccttctaccaactttgggcttaggttgttcttctttttttctagttccttcatgtgtaatggtaggttatttctttttttaaatgtaggcatttattgttataaacttctctcttaaaactgcttctgctacatcccataaattttgtcatatgtttccatcttcatttgtctctagatattttttgatttccctttcgatttcttctttgccccattggttgttcaggaacatattgtttaattttcacatatttgtgaactttccaaatttcctcctgttattgatttctaatttcatactattgtggataaaaaatacttgatataattttaatctgaagtttgttaagacttgtttgtgacctaacatataatctatcatggagactgttctgtgtgtgcttgagaagaatgtgtattctgctcttgtttgatataatgttctatatacatctgttaggtccacttggtctaaagtgtagtttaagtctaatctttccttactaattttctgtctggatgattgatccattgttgaaactgttgtactgaagtcccctactattgttgcattgttgtctattgctcccttcatacctgttaatgtttgctttatatatttaggtgctctgatgttgggtgcatatatatttacaattgttatatcctcttgatgaattgtcttctttatcattacataatgactttctttctttttatagtttttgacttaaagtctacttttctctgatataaatatagctacctttgctcttttttgtttctatttgcatggaatatctttttccatcccttcacttttagtctatgtgtgtccttaaagctgaagtgagtctcttgtagacagcatacagattttgtgtatgtgtgtgtgtgtgtttgcctttttagtacccttagctattctgtgtcatttgattggagaatgtaatccatttatattcaaggtaattattgataggtaaggacttactactgccattttgttgttttccagttgtttcgtagatcctttgtttcttttttcctttcttgctgtctgcctttgtgatttgacaactttctctagtggcatgctttgattcctttctctttctcttttgtgtatctactatagaattttgctttgtggttatcatgagacttacactgaacatgttagaacaggttattttaggctgataacttcaactgcattcaaaaactttacagttttactacccctccatctatttttttgatgtcacaatttatatctctttatattgtgtattccttaacaaattattgtacttataattagttttaatagtttggtcttttaacctttataccagatataagtgatgtgtacaccaccattacagtagtatattctgaatttgtatatttacctttaacagtgagtttttttaactttcatatgttttcatgttgctaattagagttcctttgtttcaactaattgacctatctttatcatttcttgtaagggaggcaatgaactccctcagcttttgtttggggatatctccttaatttatgaagcccagacttttctgggtatgatattcttggttggcaggtttttttctttcagcactttgaatatattatcctactgtcctgacttgcaaggtttctgttgagaagtctgttgatagcctcatgggggttcccttgtatgtaatcagtctcttatcttttgctgctttcaagattctctctgtcttttggcaatttttaaaaaattttactttaagttctgggatacatgtgcagaatgtgcaggtttgttacataggtatatatgtgccatggtggtttgctgcacctatcaacctgccatctaggttttaagccccacatgcattaatgtgcctcagagtgtttgtctttgggttgatcttgcttgggatcctttgaatttcgtgaatctgtatgtccatatccctctcaagatttgggatgtatttctttacataagctttctttccttttctctctttcctccttctgaaatcctcataatgtatatatttgtatgcttggtgggatagactagatcctgtatgccttctttactcttttttattatttaaacatttttgttcctctaattcagtaatttaaaatgccctttctttgagtttgctaattctttcttctgcatgatagagtctgctgttgaagctttctattgaatttttcagttttgtcattgtattcttcaggtctaggatttctggttttatttttatggtttctattttaaaaattaagcttctcatcttgtttatgcattgttttcctaatttcatttagttatttatctatgtctttttgcatcttattgagcttctttaagatgattattttgaattttctttcaggcaatttgtagatctccctttctttggggtcagttactggagccttattagtttcctttggtggtgtcatgcttgccttattcttcattattcatgtagtcttgcattggtatctgtgcatttgaaggcacaaatacctccttcattttttttttttgagacaggatcttactctgtcacccaggctggagtgcagtggcgtgatctcagctcactgcaatctctggctcccaggctcaagtgatccttccacctcagcctcctgagtaactggaatgacaggcatatgccaccatactcagctaatttttatatgttttgtggagatggggttttgccatattgcccaggctggtcttgaactcctgagctcaagccatccacccgcctcagcctcccaaagtgctgggattacaggtgaaagccaccacacctggccctctttaaatctttatagactgcttttggcagtttaaggccttcttctattaggttcctgtggtgatgggattgtggtcaaatgaggttggagctggatcacatggctattgctgagtccacagtggggtctatagttgataggtctgttaccaggggctgtagtagctgtggattctgtgtagtctctgggttgactggactgtctgtagaaccttggtccatagagctggcactgggatgagagtccatttcaagatctgtagatgatgggccattaccaggtgtgtgagtgggtgtggcttcttctgtgtctctggaaagtctcccagtggatcactaagtgagaccctgggtatgtagtgctgctcaagtccatggctgagacaagttagaactgagttttggggctgctttagagcctgtaactgagactgagctcttcagacctgtctttggggtcacagaagggtatgttttctggtgggtccccgggcaggcaggcttgctctcagaccacagttgatagaggctggtgctgaattacagggccatttcaagatccacagcaggaccaagatcagtgggtcaggctataggagcactgatgagcatgtctgtctccaggtcttgtgtgcgcagcactactctcaagcctcagctgagaggggctgggactgcttttcagggccatttcaggatcttctgtgggacccaggtcagctgggctgcctgtggagctcagatgagagtgcctccctctggattcctgggcagttagaacttctctctgaccacagctgagaagggctagggcccagattcaggtttgttttagggatgctgtaaaattgagattggcaagcctgccctggggacacagaatggtgtgtctcccagcagatccctgacgaggcagaagtgcttagtctgcagctgagaggggctggggttgaaatttagagctatttagggatctgttgtgggaccaagattggcaagcctgccctgaagactcagatggacatgtctccctctgggtccctgtggaagcaggactaatctcatgctgtagctgacaggggcaggggatgagttagaggatatttttaggatgcatagctgagacagaggttggtgggcctgtcttctgatgtactagtgtgcataattcctctttgacaaatgtttttggtagcaggaccaagagaaaatggggttgtagccaagcttgcaaggatatggggcagtttctaggtctggggatgggaccatgatcagtaagtgccaactgggtgtgggtctgtcctgtaaaaatgaaactcctaggtcttgggctctaccagagctttataaactcctacctgaatcccaaggctcctacaaaggcacttttgcctgttgatgactattatgaaattattgttcctttgggggatatgagtgggggatctcctattccaccatcttgctaatgtcttttctgtttcatgaatcttttaaatatgtagatccatggatcatttagaagtatgtcatttaatttccaagtgttgagagatttttcttttgactttgtattattaatttctggtttgattccattatgatcagagaacatattcagtataatttcaattcttataaattttacaaggtttattatatgacctaagatatggtctatgttccactggtgcatgagaagaatgtgttttctgctcttattgagtgcagtgttctataaatgtcaattaaattctgtggtttgatggtgttcagttcttctattcatcatcactaattttctgtccagtagttctatcaattgctgagaattgggcattgaatttttcagctataattttggatttgtctctttctcctttctactccgttagtttttgcctcatgtatttgaaagcttagtggtttagtgtatttagagttgctgtatcttcttagggacctttttattattacataatatcactctttgtctctagtaacattctttgcttcaaagtttactttggtattaattcagccactcctgattttttaaattaatgtttgcatgatatagctttttctgtccttttactttcaacctacctgtgtcactatgtttgaagtgaatttcttgtagatagcatattgttgggttgtgtcctagagaaactcatgcagtcatgtactaggtaacatgtaagggatatttatagtagtagtattcataatagtttcaaactggaaaccattccagaatagaatgcataacattgtggcaaatattttaaaagtgctgccaatctggttggtgtgtgatagtatttcatgtggttttaatttgttatttttctggttactatggggttgagcactttttagaaatttaatgacaatttggaatttccgtcagcatattgaagatattgttctattgtctcctgccttccattgttgctgttgagaagtcactgtgtatctcactgttactcatttgaaagtaatcattattttcctatatggctgatttttaaggtcttttgtttgttattttgtggttttactatgatttttctacatgtggatttctttttatcttgtctttagtttcacaattggtagctcacaattaaggatgtcccataaaagtttttgggatttgtcaagtgttggtgacagtctttcacttttttcatttttttgctaatactaactttttggaaacaaagctgagtacgtaaactttccagccttcatttcaagaagtatggttgattcatcaacagcatgtattttggagtcatgggttatgcttgtattaagtgcaaatcagtcttatctagatagggaaatctatttaagtagaaagagtggatatagaaaaatggaagttggcccaattgttcttggaaagaataggacctctgttgggaataagaaagagtgaatagtactggtggcacaagagaaagagggtcaacattgtgtttctaaggtggtgagttaagcaagtgtctttggagagctgataatgtagttttactcttttaattcttggggtatcgagcctctgagagaccctacctgtcagaatgagagagtaatgaagcatagtgatggaaactgtagcagaagtgagggggcatctggtaaccaggacttaataaatatggaggcagaaaagggaggtgctgggagaggagctggagatgggtaactagcagataggaaaagactacacatactgcaggcatgctgtaggctttctgtagggatgctgtaggtatctgtaggcataatgtagatatactgtaggcataatgtagacatctttcagcatactgtaggcatactgtaggcatgctatacactgtagaatgcagtaggcatactgtaggcatacatacttgagagatttgtagtcatgctacaagcatgcttgttttatgttacaagcaggccactgcactgaaagccatactcctggctttcattgtatcattgatagtcaagcacataaaagtctgcctgattgtggtccctcttgggtggtaatggaaacttagtgtgaaaatagtgaattcctatgcttatttttgttctgttcaatggaactcaaatcaccatggcagaggagagctggatttgcatctaagacccgctacacatcagctgtgtagccctggagaaattccttaatctctgagtatctgttttcctcatatacaaaataaagatgataaaacacctacctcataagcatttatgaaaattaaattggataatgtatataaagtgagttaaaacacactcagtaaatgtaagatattgtcactatagttctgcaattgaaagtgcttctaaccagacttaatctaactccataccattgaaatatggcctttgtcatcatggttgggaccattcatcacaggaagaccctgacaaaaggaattttcagctgtatctacatctccagaaagtgtcatcaggctaaggtcaactaccttatatggaagcaggaaataatggtgaccaagcctatatttgagacttgtaaaatgcaacctcagagggtttagcaccctgaaatggtgcagttcagtcttcatgggccattttgaatcctgcattgtctatatgccagttgattaaaacctttcaatgttgttcttgccatgcaagttggaaatccaggtgattatagaggtcactgcctcattccactccaaatgaaaaaaacctctttagcctagaactttgctgctttccaatcccagctgcactttccaaaataatttagtaaggatgtcaggcagaattttgtgtgcaggagaatatgagcaagatttagaaccacccctaggctttagttctaaatttgcttagtcattaccatggtagaggcagagagatgcatgtgctggaaaatggaaaaacggctttccaggttcagattttacaacaaacatttgctgatcacccaggctaggcattgtaagggtaaacaaatcctagtgatcagtgggtattatcttcttcttttatgtccatagacactcaaacccaagaagatcaacttatttacgtagtcaatcagggacagatttgggaccagacattagagctagtgctctttccaccttattctgttattaattgaggtaactgtgactatgaaatgaaacacattattttattagcaggtccttagtattgccacattgggatcaactttagcaattaaaaagaatcagatattaaaaaaaataacttgcaatagaagaatttttaatgaaatgtcaaaaaaggcccccaaaataaaaacaaaaattagggacagagcaggatttttctactctggaaaaggattacatgcatagaacatgagaaaaggaagagaaggagaacaaattctagcccttttaagaacagaaatgaataatttccttaggttatttgaccagtaggatttttgcaaaggcagcctttctttctttctttctctctctctctctttctttctttctttccaaataactttttcctcattatggtgctttagaaggtactcgttgctctactgtaatgttgcttattttagaggacttttcttcaactgagtggactctcagtgaaaggagattgccaatttgatccagttcctcaaccactgttttaacaatagtttcttctgttgagtctaaaataaaataaataaaacattagtggtcattttttaacaggttgaaaagtagccataataggtatgctttttgtttgtttgtttttttgagaaggagtctcgctctgtcacccaggctggagtgcagtggcatgatctcggctcactgcagcctctgcctcccgggttcaagagattcttctgcctcagtctcccgagtagctgggattacagatgcctgctacaatgcctggctaatttttgtattcttagtagagatggagtttcaccatgttgaccaggctggtctcgaactcctgacctcaagtgatccacctgccttggcctcccaaagtgctgggattacaagcatgagccactgcaccttttaaaaaatgtttgctttttaaaaatgttttttgcaagtttgcagtaaatcgatatataatactgtgtttgaagtcagtgtttagcaagatcctggactatctctcttatatttgccactgcttttagagcaatgggcatttgaaaacataaatgaaacatggattaaaacaatctaagtatcaggcagtaaaggctggctgcaagtaatgttgtcttcttttaaataccaacttgcccgatttttgtggtttaagataaagtagctcttttatcaaagtattgaaactatgaaagataatacattccaggtaagaaacatgttgtgggattaattcctcatttcaataatttcataatttgaccacatctgttgatctacgggaatataaaatacaaatattaagaactatcataatgacccctcatccctttattcaccagaagtaaacttaaaaacaaattttatttagttaaaaaataagtaacttagttaacacaattgatggagtttaaggagttacaccaggtaaaaaaaatctatctatacctttggcttgatttccagaattcacaggcctgtatccttttgatttgtaacatgtggatttgctttttctgtgaagagaagagtaaattattgcatttttttttctttccttagtgagcttataaatacctctaaattggaaataagagttttggaattctagtttcaataagattcaaattccttatatatttaaaggacattaataagcttttcatgacttcaacatagtgaaagaagagattaaatggatgtttatgaatagaaattttctcatgaccagaaattacctctttcatctagcaatatttctcactctgacttttcaatcaactggccagtgaatgtgtttggagtgcctaccatgaaaaaggtgttgctgggctaggtgctgcagaagatatagaaccaagacacagtttttacagttggaaataaagtatacacatgcaaaaagttacctataacatgaaaagtgctgtaaattaagtgaaaagtgagtggtgtaatgagtgctttgttctgaggagggagcaatcactgttgggttcctgtgagaataggctgcagagggctgatgggccttggagggtgcaagacgttacctcctcactatgcggccatgggcaagcatttagtaataggcagtgattaccaaataccttttctgtgtatgccactgtcatgagctctttacctatgtagtgagacattatagttaagacttgttacaagtatggttttggctttatcacaatttcatcaacgaggaaactgcatttgaaaaggttaaacaatgtgctcataattcacccagtatttgattcacagccagggctgcaattccagggctgttgctattgactaagaaactatggtgcctctccaattaattcttcctatatcttcattgctcatctttaatacaaggtacatgtggggtaactagtgaagtgataagaaaagagaatgagttatttataagaaatgtgcttacacactaaatcacagaaagcaattttccccttgaattggagtactggaattgttaaatattctatatttaaatgtcctttatatattatacatacaaatattttgcatacttagaaatttgattttcaaatttctgcatgttttaatttcacttggctgcaataatatacattcctgaggataaatatgtatgatctccagagtaggaaattctaggatgcaatattggcatacctatactgtgggaaaacctagttaatgtgaggtttttttttttttttgcaagttaatctttacctttcttctccatctagtaagttgcaataaatgtcaatttctttttctaaaaatatttttacatcaagaagctgttcatactccagcttctggccttctgtttctgttcgaatctgttgcagttgttcctccatcacccctatctgatcctgaatttgctggagttgattgcagtaatttccttcagtctcagccaaggagcattcataggaatgtttctgaaagaaaagcaaagtgaagcttgaatgtgtaaaagagaaatggcatggtcatcttatattattttatttatttttttgagactgtgtcttgctctgtcacccaggctgagtgcagtggcatgatcttggctcactgcagcctctcttcctgtgttcaagtgattctcctgcctcagcctcctgagtatgtgggattacaggtacatgccaccacacccagctaatttttatatttttagtagagatggggtttcaccatgttggcctggctggtcttgaatttctgacctcaagttatccacctgccgtggcctcccaaagtgctgggattacaggtgtgagccactgtgcttggccggcatggtcatattttaaatattctcaaggtagaaataattatttgtataaggtctgaatattttcaattgaaaatcaacatttgcaagatttaaaaaaattcctctattgtaaaaaggcatttttcaagttttggaattggtgagtttagggacagaattcttgatatttaatatattttatacttttagtcatatgtaaatggttatacgtacttggtgttatatgtatttttatatctgtattgacttatacatattcacacatatattcaattcaatggcgattcctacgtaccacagccatgagggactgaagttctatttccagggtttgcagattgcgttttaattcggtcagctcatttctggctgctgtggctgctccctcatgatcggaaatctgttgttgcagcgttgcactctgaagtgtaattgtcgaaagggttagtgactggcctgattgtctcctgagcaagccctttgtaatttgccatagacctaccctctcgttgaaccaggcttcagcatctttgcggttctgctcagccaagtcctcatactcagccctcatgttgttcaacaggacagttaggtccactcctggggttgcattcatctccacgttcacgttccccccagctgtatattgcaagacttccatttcctagaaaagggatcggtattcatcctcagtggaggattttgattgatgttcatgccctgctacgaaatgaacagtggacttcaagaaggaaattagaaactgtatgaagccactctgcaggcttccttacctcctcatgactttttttgaggtaggtcaattcctcactgagggtctcacactgtatctccaggtcggttgtacaaagggtcagttcatccaacactctgcgaagaccactggtgtcggcctcaacactgtggtgcagagccagctcattttcatacctgaaagattagtaaggcacctgagagttgtcatcgtaggcaggtgcaaagcacaactttttaaggtatttcatatgctgaaagatatgatgttctgtacatacctctgaagcttcttgcaatggcaaactgctaaaatggtttgagatacctaacaattcatgaattgtattttggggatgttatttcttcagagctgatttttgtcatccaatgtgcttaacaattaaataaaatattgctagattttagattttaaaaaatatgtgattgctcttttttgttgtttgtttttgagacagtctcactctgtcacccagactgaagtgcagtggccccatctcagctcactgcaacctccaccttccgggttcaagtgattctcatgtctcagcctcccaagtagctgggattacaggagtgagccaccatgcctgactatttttttgtgtgtgtacttttagtagagacggggtcttgccacattggccaggctggtctcaaactcctgacctcaagtgatctgcctgcctcagcctcccaaggtgctgggattacaggcatgagctactctatccaaccatgatagctctttttataacggcttatttaattcaatttctttattgatctagtctggctttagaaaaacattttggttttcaaagcaaaatatatattccttaatccaattgtaatattttaacttttattaatataattaatcagtttgttttcacctacttcagcctgaagtcatcagcggtcagtctggcattgtcattttgtagaacaatgctggcattgcagatggtcgcagaaataatctaaatagggaagattgtgaaaaatgttaattaccaaaagtcaaaggaggctccagacttcagtgtgattttatatcttcttaatctgtcaaacatctgttttagtatcttttttctatgttaaagaaatctggattttcttcagataataagcatccagagcttaagagccacatagatacttttactacttttgatcaaatggtatgagctaaatatatgaaaaacgaagtgactatatctgttttgaaatgatttctttttcattatttaattctacaagattttattgccaggtactgtgcttagcactggaaatacagagtgaacaaatcttacatcacataaatttgttaggcacattttatattttctcttctttaaattatcaacacacaaagtctgtagtaaaagtatgcaaatccctatttcttacctgccttttaagatcttctatgactgagaagtatctgctatagtcatgatcgtgttcccgggaagagccaggctcacatttctcgtaccagcccttgatcttctgctccaggtctgcgttggcctcctctagagcatgcacatggtccaggtaggatgccaggcggtcgttgagattctgcatggtcaccttttcattcccagagaggaggctgtgctcattgccaagaaaaccagcacaggcaccacttcccaaccctccaccgctattgcagaagcttcctccagaagagatgccctcaagagtacaagaaaagctgcttcttgctcccgatccaacacacacattcccagccacgaagcctgttcctccaccggacagcctaccagacccagttcgcgagcagatcctcctggatccaccagaaagtcgaaaagacatggtggcagcacagccgggcaaccccttcccagaaagaggagcaaagccagggttcaccttccacacttgttagctcccttggccttttatagtattcactgggtcatttcagtcttgactatgccagtctgtaataaaatttacttgcatcctaattgttgtttttcacaattgggtaatttttaacagcgtccagtctgtaggtggaaaggtgccccaaggatattttttatatataaaaatggtgccaggtgaagtaaaactaaatcatagcctcaaaggccaaaattaaatatgactaaatgtgcatctttttggccactggaatattaatagaatctagattctccccctgccacatataacaaagaattaataattccaatgagaaatgtctcctacttttgtcctgttaacgctcatagagtatttctagtattcccacttcattgagtgcttcctttcttcctttcgtttctttttcttttttcctttttttaaagatatgtggtctcgctatgtttcccaggctggtctcgaactcctggcctccagtgatcctcagcctcagcacccagctcagcctcctgtggccagcattacaggtgtgagccactgccctgggtgtctgggtgtgtgttttccttcttatcaaaaccagaaaatctcagcatctattgatcttttggtagtgggagattttaaaagaaatctaccatttcttgaattgaaaactgaagtaatagaaatcctgcagtcctgcttattgttaatttcaatataattcatgaatatgtgatgatggtggagaattaattcgattgagatttcttggtttggtccaggagcaggacatcaattcaactaacagtctccaaattgttcacttccctacccctaaatagtgtttactgtcttttagtttaaatgtatgtatttaagacattaggaattattttgagaagtgagcatcatattgattagcaaggagtaaaatatataaggagggaggtgttttcatcattacctagaaaaccagtacttatagtaccctagagagaagataagttgtcacagggaagtactctttattctcttgccttgatgctcttgggaagttatccaggcttggatcatttccctactgggcaaatgaaaataatagcatcaaagagtctcaaatgaatgttgagcagttccaatcatgaatgacgataagacagtttgaaaggcacaaacatttttaaatgttaattatttaaattattataataaagtggacatgtcagacagggtcgggtctctatcacctataatgatacaaattgattggttaactaattatgggtttagttttgaaacagtaattttcttccgaatgatatttttcaatgttgtggatagtgaatcctttggaaaacatccaacattattgtcactaaatcgtatggaacatttagtggactgcatggattttctaaatcaaaaatatttaaaaataaataataaatacagagctataactggaccatcagcttatgtttagaacagtgcatgataacctagatacagttcctgtttagagactttttactgattttgttgtgacctggtcaaatttttaatcttttgctaatttttcccagaaataaaacaagaaaaacagagagtattgtcagtttaatgatttataaggcttgagtttcttaggtgagttattatgagatttcaaagtattattaacataatctatttatctctagatactttataaatacaaattatcttttgtgaaacaagttaaacacatattattaggactattttggagatgagttgtctctgaagctaagtggccacacagattacaaagcatttctatatcaaagcaggactggaatatatgatgcttaactccttcttgaaatgttgtcgcctatttactcacgtgagtaggtcttttaaattattttaatcatagattttcctctaaactaatacttattttaaaaatttaggtatgctctagttctttctggaagtggagacagatttaacacattctctggaccacttcagtctatacatttcttccccgggattgattattttatccatggcaagaatggatgtacataatagatcatttcttgataatctactagatagtagaacattacatgatgtgcatacgtattttagatattcaaaatgaatcgaattaagctttatgcagtgttgctgtctccttatttcaggataaagtttttcattacattatcttattctaatgatcatatgctaattttcccctgatacatttattgtttagtttcaagtacactgttgtttaaaattcacattctatatttatgttagataaccatttttcttgaacttgaatgaggtttgttttgtcactagattcctaatttttggttttgttttttgtttttttttttcctgagaatcagattctggtatactaagtccgcccacaaaatggcttccctggtttgttttgggaagaaggagatactgatgtctctgctaatctcagaccgactggagtgagcatgcacgtagtttctttatcccttctcttgttatagggaaggtggagtcataaagttctcactagcatggtattatgtcgtggtgaagcaccagactctgagctattctgtgtggtttacgtatttcagcacttcatgttattactgtgtgatcttgggcaaattattcaaccagtctctgcctccgtttccttatctgtaaaacgaggacgataacagtacctacctcatagggttgttgtgaggaataaatgatgcttagaacagagtctagcacctagtaagtgctggttatcaactattattgactctttcctggaagtcatatttaaaggttttaaatattggcctggttttagcagaaagaatttatttcctgagttatggtgagttggtggtcaggcgtttcaaatactgtgaaatctgagctaagtattcggtggctcacgcctgtaatcccagcactttgggaggccgaggcaggtggatcacgaggtcaggaaatcgagaccatcctggctaacacggtgaaaccccgtctctactgaaaatacaaaaaaattagacgggcgtgatggcaggcgcctgtagtcccagctactcgggaggctgaggcaggagaatggcttgaacccaggaggcggagcttgcagtgagccaagatggcgccactgcactccagcctgggcgacagagcgagactgtctcaaaaaaaaaaaaaaaaaaaaaaattaaagactttttagtattaccgtttactcttagtgttgtatattctacgggtttggaaaatgtataatgacacgtatccgttcttatgatattatccagagtattttcacagccttaaaaatcctctgtgttctgcctgtgcatccctcacctccaatttctggcagccaattatctttttactatctccatagtttcgccttgtacagaatgtcatatagttggggtcatacagtatgtagccttttcagattggcttctttcacttagtaatatacatttaaggttcctctgtgtcttttcatggcttgatagctcatagctttttagcactaaataatattttgttgtctagaggtaccacagttatttatccattcgtcaaccaagaggacatcttggttgcttccaagttttggcaattacgaataaagctgttataaacatctgtgcacaggtttttgcgtgaatgtaacttttcaactcttacgtggtaggatgtttccttttcctaattttgatatgagggtatatgatgtgaggactggttaattaaaaagttaagtgagagggtatctgccttacattcgcttaggtattattacatgcgtgtgggaaaaagaggaggaaagacagcttgaaagtgactgtgtttcaactgtgctgagccaattctacagagttcagtaataggacactggttccagagaaaaacaggctgtttctgttacgggattggtgagggggagccaaatctctcacccacaaataaacctctggagggttttctgctgagtttaacctcctcccactcccagccttgaaatagattcattaatggtaggtgctgaaattattgcactaaaagttacctttgacttgagagccacatggctctgcagtcttggatggcaaaaacgaaggagagaacttgtgaattcctaccgttatggtggagtgatcaagattatgaattagatgcctgctggaattctcctcttacccttgtcctcacagctctctttttccccttctaccttcaaatatcactacttatagcctttcctttatgtttaagtttgtttctgattcttcaggttcttatttctacatctatgagcatattgacttcagggactggatcttattaactgttttatcctcgttatctggcacatagcgtgttctcagtaagtacttttcgtactgagacaaaggagacaaaattttacagagaagtcaaaaagactccaactagttttcacattaaacttacttccaacttgtgaagactgttgaattaaacagaagaaattaaagacaaaattcagcttccatttgggagggtatatctaaaatgcaaagattggccagaaccagggaagatgacttgcaacaggaagaacttttattgaaacaccaccatagagaaaaagccaaagaaatggtactattctaaaaataacttgtcttaattcattggaagaaaagcagaaaaataaggggacccttatttaggaaactagcttcattttggtattttaatttgggggccattctgtctcagaggctggagttcaggaagacaccctctgttcattcttgttgttgactttggtggatttctcttccacagtgtgaactctggatgagagaactttgccacgaggatctatctcttcaacaactgttttgacaatggtggttttagatgaatctaaaatgccacatataaactgtttagaatttatcaaattcataaataggaaataaaacatcatttgaaacacatacaaataaacactgaatgcctaacacagcttttgtttaccttttgtttgatttcctgggcctccatagccttttgatttagaacaggagctgtaaaagtatagagcgcttatattaattattctgttttactgaggaaactgaaaaataatgatttaaggtgggaattcactgcattctgaaataacactaaaagagtattatctatgcgtgatctagatcatagatattttgtacttgatttcaaatcatctttagtaaccttaaaaatgaattgttttctcaatggcggcaatactgacccatcttctccatctatcaggaggcagtaggtctcaatttctttttccaggtggaccttgatgtcaaggagctgctcatactcgagcttctggccctcggtctcggttctgacctggtgcagctgctcctccagggccccgatctgagcctggatctgtgccagctgtgcacagtagttactctcggtctctgtcaaggagcactccagggagtgtttctgtagtttggtaagacatggtttaatagaaaaggtcacggtgttttagaataagccaaagcatttaagagataattaagagaattatccttacatcatgcaaataattatatttacccaaaagattccacttcttcaatattaattgttgcctttattaaatgtcctactacttttctatttgagaatgacacagctggtgctgaatgtccctcagatgcccaggtgtgctaaaaaagatgaaattgtctcttcatagggcacagactgaaagatccctcccctgcaccaatatagcctgtgcttgtagagtgtggcacaatttgctactttacccacaactagaagtccgcctatactttgctactcatttctagccatgtgacagtcttgtcttatgaggattgtagctcttctattaaaaagtcatcctgcagtaaaccgcataaacgttccatgagtagaataaaccacagaaaataattaccttcttagactttaaatacagtagttcaattcattggcttgtgaatctgaatgggtttacagatatactcagagggaacactcactgcaattttacatggaatgaagatgagagtgtcttatcctttcacctgcaagtattttttatataaagtcttgattttatatacattcatagcctcatctgtggataaactctggtggtttactagccatagtgggaaaagtatagacttgggagttagaaaatttggagagaacttctggattccttcatacccaactgtgggactgtgggaattgcttaacttcttcgaatctcagagtcctcttttggaaataatgacatgagttataacgtctgccctgcccatgccccggggttgttgtggactcacatgtgggcggaagtgctgggcaaacccttaatgaaagcagttatgattatcattacacatgtttagttttatagtcagccttcatgcctcgacttttcctctgtctatgccacttacaaaggaacttgtaagtgctcttaattgagtggccaaaaggaatgctagatgaagctaggagtggtgcaaatgtatttttgctctctttaagcagtaggattttttttctttttttttaaatggacacataagaattgtatatatttatggggttccataattatatttcaaaacacacaatgtgtagtgatagaatcagggcagttagcatatccatggtcccaaacatttatcttttttgtgtgtgttgggaacattcaaaatcctctccttgaactattagaaattatagaataaattattcttaactgtagtcattctacagtactatagaacacttgaactgattctccctatttctctgtaattttgtatcctttaaccaacctcttcctatccccccatccccttcccaggctctagtaagcacttatcccactctctacttctgagatcaacttttttagcctccacatatgagtggtttttgatattttgacttatgatagaagattcaaagtcaaaacgattttctttttccagtatcttgactgtatttgctaatttctaatatttcataattattggcatccagctatactttgtaggcaaagaggattgtcatgtgcaaaatgcaaatatgtcttatgtcaagcactgtaattaatggttaaaaactaaaatatgtaattatgttggaagaaaattctcttcgattatttttttctcaatttctaaagcaaatctgttttgtaacttttcgcttaccgttgctaagagggactgaagttcaatctcaagggtttgaagagtgcgtttcatctcgataagctcattccgggctgaggtggtggcgccagcgtcgtcagagatctgctgctgcagcgaggcgctctggaacggcaggggccgcgttagggcgctggggctgagtccgcgcccgggcgcacccaagcgtggttttaccttttcgttgaaccaggcctccgcgtccctgcggttctgctctgcgagggcttcgtactcagctcgcatattgttcagcagaaccgtgaggtctaccccgggggccgcgttcatctccacgttcacgttgcctccagccgcgcactgaagagctttcatttcctgaaagatatttgtttaacggaattaggatctgaatattttatttattgcactttttgagttagggtctcgctctgatgcctaggctgaaatgcagtggtgcaattatgactcactgcagcctcgaaatcctggcctcaagcgatcctccattctgggtctcctacagtgttgggattataggcatgagccaccgcttctggcctgaatatttttaaaggagtcagatggacaagatctatagggttagaaactttttgggaggtttgtttcttttgagaagaatgaatagaagcgtctcaaacaatctaagccttatggagaaactgacaggttccttcttgaatgttaatttaagacattatatttatcatctgaaattagttttaaaatttggtagggaggcgattgtgagagccagccgggtggagcttctacctcctcatgattcttcttgaggtaagcgagctcctcactgagagtttccagctggatctccaggtccgttctgcacaaggtcagctcatccaggactcttcgcaaaccattgatgtccgcctccacgctctggtgaagcgctagctcgttttcaaaccttagaaaagtatttggaagtttcatcattagtcattagacatggcacatcactttttagatcatcatacaactcagactaagctttgaggtaaaactactaagataatacttaaaacttcaggccgggcgcggtggctcacgcctgtaatcccagcactttgggaggcagaggcgggcggatcacgaggtcaggagatcgagatcacggtgaaaccccgtctctattaaaaaatacaaaaaattagccgggcgcagtggtgggcgcctgtagtcccagctactcgggaggctgaggcgggagaatggcgtgaacctaggaggcggagcttgcagtgagccgagattgcgccactgcactccagcctgggcgacagagcgagactccgtctccaaaaaataaataaataaataaataaattaattaattaaaaaaacacatttcagttaggtcatctatcatgcaataaatacatttcattgaagcaagagaatgggaatagccaaaattctttctcatatgactttgacactcgtttttgttagtcccgaaatttcccaagtaaaatttgttgctcagctagttactcattctaacaggcattttgtttaaaacaaatacatgaataaacaagaacaaaggcttgagacaacgtcaaataacttagaagaataaaggagaaaaaatgcttagacaacttttttttcccatttatcttcagctctacttactttagtctgaagtcatcagctgttagtcttgcattatcattttgcaggacaacatgggcattactggtagttgcagaaattatctgacaaatgaaaagttagttaagattgaggaaatatttaagatgcatttcaaagttccttgaaataaaattacccatgaaattatagtaatatttctggcatctgtctctaataatcagaccattcttttgaagatgggtaatttaagtatggtctctctctctgtcttttattttgagaccgagtctcgctctgttgcccaggctggagtgcagtggcacgatcttggctcactgcaacctccacctcccagattcaagtgattctcctgcctcagcctcccaagtagctgggattacaggcatgtgccaccacgctcggctaacttttgtagttttagtagaaacagggtttcaccatgttggccaggctggtcttgaacccctaatctcaagtgatccacctgccttggcctcccaaagtgctgggattacaggctgaaccactgtgcctggctgggtatggtctcttgtatttcccaccccaagcattaaaaaaagctctttctatgggaaagcctataaatatataactggagacactggacagcttttgatattttaatattaccaaaagcatatacctaatactacatgatggacgtgccatgttcaaatattagaatttattagaaattatttttaatattgaaaatgaactcctaaaatttagaagctgagggcaaagccctgttattgtgatagcttatacatttgtgcatctgtgagtggctaaacactctcaggagtgctaacactcacgccatggcgtttcttacctggttcttaagttcgtcaataattgggaaatatctgctgtaatcatgatcaaggccacggcaagaaccaggtccaaatttctcataccaccccttgatcttctgctccaagtcagcgttggcctcctctagggctcgaacattctccaggtaggaggccaagcggtcgttgaggttctgcatggtcaccttctcattgccagagaggaggccgtgctcattccctgtgaaggcagcacaggaagcacttcccccgcccagacctccgccatagcctcctgcagatgagctgcccccaaaagcacaagagaagccacttccaatgcctggcacaccgcatgtgtttccagccccaaagcctgctcccccactagagagcctcacagagccagtgcccccgcaagagccaagtctcctggaggtagaagaaaagcgcacagacatggtgtccggaggctggagcctttgtttctgcggtgatgctctgatggtgaacggcctactcaaacagcttggtttgcctttatatacacattattagggtgtttcttgatgagctttgctcatagccaaatgatgtttgccagctcattgtgaattatccataatggggtgatttttttttttttttaatgaatggctttaccatactgtgtccatttctgtaggtggatagttattgtggggttatttgttatctctggagttggacagggtggagtattatcaggattattatagtgatgcatttcaaatttagtatgagtaactcttcctgtcttccaggcttcaggaatgcataatacctataagaataaaaaagtatgatagacagatttctctttcccttgctcaaatcagcattgcattttcttcagcaatgaagtatcatagtatcagaagaaggaggggaggtcctaaaggaaaactgaggcattaaagggaatcttctttggagacagaaagtgttcctttgatccttatccttcctgaattaccatttcatctgtactggttttctgtctaagttccattgctaaccaggttaagtaaaggaattggtcacctcctcgggcctcagtttccacatctgtaaagtgaagggtctagactgtggtctctatattcactttctgtctgtagattgctcatatttctgcattccttctattggctgtccatttccatagcacttttctgcattgcttcttgtacttttcacctcttatttctgaattgtggtcccactattttactgaaattaacctctcagacatcactgcacatctctaatcatcatttcttttattttttcccctataccctcttggttacattcaatactgacaacctcagtctgatgagtctgatcgagtttcagacagttgctttctaagaaattttctacatctcatgttgctccccttttctcttccacttatagctcctgtgccctacctttgtcatttcttatagttttgtgcttggtatttacgactctctctcttttttttttttttttgacagggtctcgttttgtcacccaggccagagtgcagtgacatgatcacagctcactgcagcctcaacctcccaggctcaagtgatcctcccacctcagcctaccaaatatctgggactacaggcacacgccactatgcctggctaatctgtgtatttttttgtagagttggggtttgccatgttgtccaggctggtcttgaatgcctgggctcgacagatcctcccaccttggcctcccaaagtgctgggattataggcaggagccacctcactgtcttaatgtaaattttcccgcactgacttgtccgttctgttttactacttccctctttcccatctctttgcctttgttcatgttattctttccacctggttttcttcttcagactaaaaattataacaaatcatttgagatcttgcatttgccaagaatgattgacatcactttcaattacctagattgaaaatgaagttggcaaaaatataaattttcatgacttaataaatgagcttgcggaaaaaaagccagaaagatttgtcaatcaatttaatacattattaaagtattatggtttattgttttacataaaattaggacaccaaaacattatttctttgctgtttgtagtttatgctgttatatatgtgtacccgttacctcattacatgttataaataataagactttttagaagaaaaagatttatattttactatttctttttttttttttttgagatggagtctcgctctgtcgcccaggctggagtgcagtggtgccatctcggctcactgcaacctctgcctcccgagttcaagtgattctcctgcctcagcctcccaagtaggtgggattacaggtgcctgccaccatgcccggctaatttttgtatttttagtaaagacggggtttcaccatgttggccaggctggtctcaaactcctgacctcagaccacccaccttggtctcccaaagtgttgggattatagacttgagccaccgcgctggacctattttaatatttctaactgaactttttttctgacttttcaacaggagacctcacattttcattttgcactgggccttgtaaattatgtagccagcccgaattgttgggtctctctgaggaagctgaagaatctcagagaaaatacctccagatagaattgtttgagtgttctccacaaaaagggagctcactgtacaaccactctggaaggaaacacagacacttcacacaaagctttcaaatgtttaaggtcttactcaaaacgaacataatttaaaatatcacgatacattgaaaaacactccaacaagaaagacagagactcaaacaaacaaaaaatagcactcaggggaaacagagataatgaagaacgttgaagaaaactttaaaaaagaaactacctataattattactttcagaagtaacaaaaatactgtatatttaaaacatggatagaacatcattaaaattgaacaggaagcacataaaagacctcttagaattaaaaactaagtcccaaaagaaaacttcaatagatgaattggaaaataaatttaaaaaaaaactccccaaaattagaacaaaaagatgaaaagataaatatgtgagccttgaaagagccagtctctctctctctctgtttttttttttgagactgagtcttgctctgtcacccaggctcgagtgcactggcgcgatcttggctcactgcaacctccacctcccaggttcaggtaattctcctgcctcagcctcccaagtagctgggattacaagcacatgccaccatgcctggctaatttttgtatttttagcagagatggggtttcaccatgttggccagattggtctcgaatgcctgacctcaagagatccgccagcctcggcctcccaaagtgctgggattacaggtgtgagccaccgtgcctggcgtaaagaaccagcctcttaagatgagtcctgagcagctaactgggcctaaattcaaattaaaaccaagcaaccatttgctgactacaggtcacatatttactctgagttcccagaaaatgtgcacatctgcttaactttgggactttcatagcttccagtttatgccacctgaaccaaacaataggctgtaacctacatggatcaatcagaagtctgcatgccctgactaataagagctaactaagcaaacatcaaccaaccagaactaagtaaatttcaatcctgcattttgcataagcagacctaagtgggaacctgggtgggaactttctctaaaagacaaattcccttcctttgttctctggaacacattttcattttacaccaaaggctgtgtctcaccagcttgctagctgtttgctggaatgaagtctctgtccttgaatttccttctcagagaacttgtttacagataaaagaaaatattagaaaatgagagacttgggccgggcgcggtggctcactcctgtaatcccagcactttgggaggccgaggtgggcggatcacgaggtcaggagatcgagaccatcctggctaacacggtgaaaccctgtctctactaaaaatacaaaaatattagccggcggtggtggcgggcgcctgtagttccagcggctgaggtaggagaatggcgtgaacccgggaggcggagcttgcagtgagccgagatcgcgccactgcaccccagcctgggcgacagagtaacactccatctcagaaaaaaaaaaaaaaaaaaaaaaaaaaaaaaaaagaaaaagaaaatgagagacttggtcaaagaagaacaacatcaagtaggtcttctggaaagagagaagggagaaatcatgaagaaattattttataaacatattttctgaaatactactcagaactaaacaactgagcttctaaattcaaagagaccaccaagaaccatgaatgataaatgaaaaacatccacagtgaggcacatccacaggatctttcagagaaccatggctgggggcgggggcgacaaacaaacacttaaaatgtcaggagcaaaaccaacacatattcaattttaggaaagccatcattctagtgaagaatgctttcaaaatacgaacccaggccaggcgcagtggctcacgcctgtaatcccagcactctgggaggccgagggaggtggatcacttgagatcaggagttcaagaccagcctggccaacatggtgaaaccccgtctctactaaaaatacaaaaattagctgggccatggtggtatgtgcctgtaatcccagctatttgggaggctgaggcaagagaattgctcgaacccatgaggcggaggttgcagtgagctgtgatcacaccactgtactccagcctggttgacagagcgagatgctgtctcttaaaaaaaaaaaaaaagtgaacgcaaaatgatatccaaccttttatttctaatcctttcctaaggtttgtcacctcatttctaagtttttttctaattgtgacttatgtagagaaccaaaattctctactttaacaaccacaagtgagggtggaataaaaatcttttccgacatgaaaggtctcaaaaaaattatctcttttgcacattttgtcaggaagccactagagagaaaaacatgaaaaaggaaaacttaggttcctggaaatggagttccaatgtgagcgcactgagtgagtgttcccacatgacagctgggtagcaggcttaaaaaacagccaatgttgcataggaggacaggagattctgaaagtgagcacttcagggggatagatgaaaatgatttcttggtagttttaattgcataagaaagtggcatgagagataaagatacggagaaaacaggggttaaactacttagaaaatcgttctaactttaaactaagggtcctccatgaattcagaagggaacggaacggcctagatcctgtgaattctcaaaactgaccagccatggttccctcctgggagagcaacccacgacaaggagaaactgctaggggaagaatcaaaattattcaggagagggtcacagagaggaaggaaacagaaggtctagatacaagtggaggagggaaaaaaagacaggaaatttcagaaatcaagccaatgtatttttgaatcctagataaaaacaagagaaaagggagctctgtgaagttagtaaagctatttggaattatactttattattattattttttgagacggagtctcactctattgcccaggctggagtgcagtggcacgatcttggctcactgcaacttctgcctcccaggttcaagtcattctcctgcctcagtctcctgagtagctgggattagaggcgtgcaccaccacgcccagctacttttgtatttttaatggagaagggagttcaccatgttggccaggctggtctcgaactcctgacctcaaatgacccacctgcttcggccttccaaagtgttgggactacaggcgtgagccaccacgcccggcctggaatgatacttcagtctagaagttaaggaacatgaattggcaataaaaccaagcaaaagaaaaggattgaagtaaaatcccgggaaatgttaatacaagataataaggatgaggagcagcatagtgtccctatagaaaatgaaagcataccggaaagacatgcctacaaaactgagtaagatacaacccaccatttcaaagtgacttaaaatcgctaaaatgataaaagaaaaaaaaattcccataaaccagaattagaaaaaaacttagaaatgaggtgacaaaccttaggaaatgattagaaataaaaggacaaaaacctaattaaactaagatacaatcacagaaaatgagaaatttaggggaaatcagtcaccagaagaaagacatattctggaaataatcttaaataaaatattagcaaatacaattcattaatatattaaatagcagaaaatatcccaaggaagtttttcaccagaaatgacaatgactcaatatgatatgtagcagataaaagtgtcctatgacagaaaccatatgatcaccttaaaagtactagaagaaaatgtgggtcccagcagttgtaaaactcagaacctatgatggaaatttttataaatatgacaatgaattatacattcctatatgatgacaaaaatcgaaagaaaaatagaaatgtcaaaacatttgctacacccagtaacaagtggcaatttatttcccttgcaaaaagctcccataaatcttgggtttttgttaaaagaaggaatagcagcgtgtagtttttgctttaacaaccactcgagtacagtggttgcattcctttttctccagatggagactgatttttgggaagtactttcagtgtagtaacccaattcagcaaaaagcaggatgaagcttcaaggattggagaagaacaggcaatcattagcagaatgtgtaaagaactcaggagccctagaattccgcccagcaaaggaaaatcagtgaaccgaaggccatagtctgtttttataagccaaggaaggaaggacagatttaagacccaaaagcctgaggacaagatgtttcctcccatcctgtggactcaacagaacttaaaggaaacttatccagaatttaattttactcccattcctttgctgaatagatacacagttaattctggtttatttgtttcagcaagaaatggtgaatttatagttatcttttcaagtcaactgtcccctcaccacaaagtgtagtgtgcactttctgtgctgtaatgggccttgccttggaaagcaggccaccatgaagacagttaaaaaaaaatcagtgtgtcatgagcatacctgataagcaggtctggcatcacaggcataaagcctgtgtgtgcagctgcacaaggtctcatgttcagaaaggccccacatttggattaatgctctcccgttactgtcttgaaaatcttagtttcaagatggtaacagaactttatcttttaacctgtctcttgttagtgaattctgttgggaccatgggggcatacaagtgagcatagaagtatgccagatatgtttgcctgcaggtgctccttactgtctcaggggcatatgcccatgtgcccaacattctggtggatccacaaggtgcaggagtctaacaaaacccaaagcaagtacaaggtaagtatattgtgtctttgactgagtaatcccaatctctgtcaaacccaagaagccaggctttccattcaaaccagaacttgctctctgagtataaaaagaagacattggtcttctaaaaaatatgaatgaccaaggaaccctatcatatacttttttttttttgaaacagagtcttgctctgtcacccaggctggagtgcagtggtgccatcttggctcattgcaactgccacctcccgggttcaagtgattctcgtgcctcagcctcctgagtagctgggattacatgggtgtgccaccacgcccagctaatttttgtatttttagtagagatggggtttcttcctgttggccaggctggtctcgaactcctgacctcaggtgatccaaccgccttggactcccaaagtgttgggattacaagaatgagccactgcgcccagcctatcatatagttttttctgctgctttcctgcttgcctgtgttgccaactgcataagtggaaaatgatgacatagaaagatcaaacaatccatagttccttttcctttcagtctttttactcattggtaaaccaaaggtagagaatgctggtagaaggtgggtatatacagaagtgaaataaaaacaattgagtttgttttgtgcagtgtttccactgttttggtaggaacaaaatacatatgcatgtatgagctacaaattatgaattgtgtgattttggggattctgtatacaagttaaatgttcttttgcttggatttcaaactggcatggcacaatataaaaactcatagtaacatgtatgccaataatttagaactttaatttttcattatgatatggtttggctctgtacctccacccaaatctcaccttgaattgtaatccccatgtgttgagacagggaagtgattggattatgggggtggtttccccctggtgttctctgagatagtgtgaattctcacgagatctgatggttttataaatggtagttttttctgtgccctcacacactctccctttcccgccactatgtgaagaaggtctttgcttcccttcaccttctgccatgactacaagtttactgaggcctccccagccatatggaactatgagtcaattaaacctcttctttataaattacccagtctcaggtagtttctttatagcagtgtgagaatggactaatacactttacttagaacaaaactaaatagcaaaaaaaaaaaaaaaaaaaaagaaaagaaaaaaaaagaaaggaaacaaaacagcaacaacaacaacaacaacagaaaaccccaaatcaaaacaacaaaatccaggacaaattgaaaacataaatgcagatgcaaggaaacagcttgatattttagtgcctttgggtgatacatttttcctgattgttgaacaaggaatcctatgttttcatttggcgctaggtcctgaaaattatgtagctggccctgaatattgtacatttggaaatcatttctctgtggatttctagtatttgcttcatttgatggcttttggctgaagattttgtaaatatctcattctttgccacttctctgaatcccatgtgactggaggattgtgagacagaattccttctcttgctggagattttcactggaatcaggccatataccagagaaataaaggagctgctttccttttaggcaatttaatatttgttgggaattcctaccatacattttgatccagaaaggtataaatagtcataatcacaagaatcatgatgttcatcagcctcatggggcttcacattcgagaacaggtgttggtgggttaaatttggcctgctatgtgtttttgtacagactgtgagctaggaatggttttacatttttaaatggtcaaaaaaagttaaaagaagaagaatattccacgacaggtaaaaatatttacaattcaaatttcagcattaataaattaagttttattggaacacagtcatgttcattcattcatctattgtctacggctgaggtttgtagttgaaatagagactttacggcctgccatgcctaaaatatttactatctgggtcttcacaaaaaaagcttctgacccctgttctaggaaaagtgtcactaacacaagccatattgctgtggatttttccggagattatcctgtttagacgaggaatggtatcctgggtattgtggaaagaagagtttgagagaggctcttggtaaaataccaggaatgcgtcatctagtggtgagacttttcagtcacaggagaatttctgaagtttttgattatttgcccacatagacacgatgtgatttaaagattatgcatagtgaatgtttcatattcaaatgccatgtggcggtattgactattatttaaaacaacagtgaaaggcaattaaaatatattccacaagtgtttctctatgaatgagacatagaaaaaaatcacaaatagttatttattagtcatcagtgaatggaaatgaatgcacatcaacttttttatttattggaaacaaacactcaatatcctgtaaaactaagaaaacaggtatttttgctaagtaatgtatctttaaaagtaaaaagtgtgtatattctctctgatatttagaataatgcaattgtacaggatcctttcccaaattattcttttctctaaaatgacagctagaaaggaaccctttgttctgtcttgccgttggtcattttagatgtcttttcttcaatggagtgaatccttgatgaaagaactttaccacgttgatctagctcttcaaccactgtctttaccagtgtggttttggataaatctagaaataaaacataggcatacatatattcaaccaaaaagattacatgacaattccactgctagttcaatataatatattatgcatatttttgattgagggagtaagtatatatttataataatagcttgggatagttttagccacttgatacttcctattcagaacagtttagctaaaactacttaaatattgactacggttgtagtgtatgactgccattaatgtaaaagtattgctgtgatagaaatagaactagagggctcatgcttgtgatcctagcactttgggaggccgaggtgggcagatcacctgaggtcaggagtttgagaccagcctggccaacatggtgaaactccgtctctattaaaaatataaaaactagctgggcatggtggtgggtgcctgtaatcccagctactcaagaggctggggcaggagaatcacttgaacccaggaggtggaggttgcagtgagccgagatagcaccattgcattccagcctgggcaacagagcgagactctgtctcaaaaaaatttaaaaaaagaaaagaaaagaaaagaaatagaactagattttattacctttagatgaattcccagggcttcctgatccaaagccctttgatttggagcatgaactgtaaaagaaatatagtttattcttttatatttctgcttactatcgcttcagaaatattcattgactcaatgaatgaaatttgtatgccaaaaacaggtcttagttttctatagaggaaactcttaagatttttatgtgtaggagctgaaagtaattaaatgttatctaaagagagaatataaataaatcttgtttccatttgatttttttttttacacccaagaatttaaaacttaaggacatacatatatatatggatccaggtggtttgtacagagtacatttatttcagggcagcagtgaaattaggtatgcactgaaagaaggataaagcctgcttgtgggaggtggagagaatcttgaaacccacagtgattaacatggacaacagatgggaatggctgcaggaacatttccagtcatctaatgcagaggagaacactgtgatgaacaggatttggaagagatgactctcttccaaaaaaacaagagatggacatgcttttctgcagtgggaatgaaaaagaaaaggcttggaagtatggaaggctaatgggcagcccacatttgtagcttaaaagaggtaaaaactggattttcaaatggctttacttactttccatctccatctatcaggcggcagtaggtctcaatttctttttccaagtggaccttgacatcgaggagatgctcatactccagcttctggccctcggtctcggttctgacctggtgcagctgctcctccagggccccgatctgagcctggatctgcgccagctgcgtacagtagttgctctcggtctctgtcaaggagcactccagggagtgtttctgaggacatcaaagaagccgtggcaagggatgaaaacactctgaggactagtagaacattgtttctcagtaatcagcaggattgctccctgggcaattgtggaaatttgtgaggcttgtcacaatcaaatgggaaagaaaggaggctggcatttatgaagtgagggccaggcatgatggacgtgggatcctgacccgggataaatggcccttttcccacaagacttttgatgttccactggacattgatgatatataggtcatatttctattaaaaccaactgatatattaaagcaccttttaagggtagcagaataaaaaatcgatatgggaaaacttgtattttgaaattatatatttatttcagggttacctgttgtttccatcttactctgctactgtccccgcagatccactccgctagtgttccatggccttttgtgctactgctttttttttctctaatccatccttgattttctagcctctatcaaaggtcttttattaaggtacctgagattgaatgagtgccttaacagatgtgagatttcaaggcaagagctatatctcataacacaatacaggtcattatttcgacactactcttatgaatatcatacttcctctttgctacttctacagtctgtaatttgtcttggcacctgctgcctcctttaattaaggtaattttcctctttcccttattatagataaatatgtctgggcaattattacttctgttgatattagttattatccaagtgtccaccccaacttccactctttcattttccttttcttgtgtggaggaacttctgatcttacatggttgaaaatgaaagatttattaagagaagatgcaaggctctgcctctttcattacattttctagggtagttaggcccaagtatttacctagtaaatacattttatcttaaaatacttgcctttttattgcatttatggtattatactttaaaaaataattttgtatatttctaaatctattacctagtgacttcattctagcattgcaaagaaggaattacacaatatttgtcttaacgggcagacattgggtctaatggggctgagaacctaacactgacttagagctactgacttaggcaaacagacgtgttacatggagggtgctgggctctccaggagcaggtaagtggaaggagatcaggatggtaatgcggagagtaaggcaacaggtagcaagacgccagtgaggcgtgtgctcggcagctcaaaactttaatttccctggtaatgcgtcctcctagggtattcctttttatgattgctaatacactcataagtcagagaggacagcgtctctacttcacagtcttccaccgtgaaggctggcttgtcaaagagggaggagaacaggatgaacttgaaagtttgtacatcacaggaagcaaacgtgaacatttgtgtatttagacaactcccaacttacaaatgacttgtgttctaactctaggagattgagcttagaattcataagacaacagggcctcagggatgtaagttaggtactatgctcccattattctagaattcagttatgtcctgtgttaagtgggctttttatgtgtggattatcctatgagcccaaattatagtaccactggctgcacagactctaactactttataacatccttgtttctatgtgaaaatgctcacaattctggtctggggactcgaaaatgtatttccatcagcgtagctcagaaatagagggaggattcactcacacagctcctgcagcaggaacagagtcctcagggatctagttcagggaagaagggaaatggagaagaaaggaaggttccaggagcccacagtggcaggggtgtctcgggtacctgctagcagcagtgatgagggagaggagaagagggccatcctggttaagttaggggccagtcagtgtaaaaacaagtctcccatctaaatccgatatagggagaaagcacacacctttagagggcggctaaatcaaaagaatctcccgttgttttgagtcatcttttcctttttggctcactgcactcacttgggtaacagctgctctcttctttgtgttacaacctggtgtcctcaggaggcacgaaacctcttatggggaagggagtccttaggccatgtgcatgccgtaattctcaaagtcaagccttttgggcactgccagctcacactctagaagggaagccatttttaatcctgggttgacgccatgctgacctttgaagtaagccaggagctggtggtatgcccaagtggctgaaggcctggctcccaggtgtgccctccgggatttgacctctgccctggactctgtggcgatgaagagcctgacagtgcccatgtggcattcaggtgtgtaccctctcttcctctgcctggtgaaaccacatgtggcttctaatatgtcttcatcagtatcaggagatgctggtgtgatgctggctccctgccctgtgggacactagccccacacccctgatcatagacctgtggctaattttctggtgcagcaatattgctgctgtttgttttgcggacctaagctgaattaccctgagaaaggatctatgtgaaatgtctattttcatgaaatgagcactaagcatcagccaggaaggaaactcccagtgatgtcaaggaggaagaaaaagctctcttttgagtgtctatgcatctgttttttcctgctctcctccactctctctgctaagtatttgcaggcaaaggtataataggaaaaaagaaggaagggcagagggaagtgtttctcggaggctttctagaatcacaggatccaggctgaccttcgctgtcacctaccgtggccatcagggactgcagctggatctccagggtctgcagggtgcgcctcatctcggtgagctggctccgggcgaaagtggctgcgcctgagtcgtgggagatctgttgctgcagcgaggcgctctgtagggccgggaaaaagggtcacacggagtccccacccccggggaggtgtgagcagggagacggggcccacctcaccttctcattgaaccaggcctccgcgtccttgcggttctgctctgcaagggcttcgtactccgctcgcatgttgttcaacaaaaccgcgaggtctacccccggggccgcgttcatctccacgttcacgttgcccccagccgcgcactgcagagccttcatctcctggagagaagcaagagtgtggctttaggggcattgcaggttcacactcagtctgagaagttctcaaacgtgttactttatgtctcaaagtttgcggtcaggtgtataatttatggcacacaattttttaattgacatattcggtccatattcatgccaatcatctatttaattagtgaactgttgaccgggcgaggtggctcactcctgtaatcccagcactttgggaggctgaggcgggcggatcacttgaagccaagagttccagaccagcctggccaacatggcgaaaacccatctctactaaaaatacaaaaattagccaggcttggtggtgtgcgcctgtagtcccagctactccagaggctgaggcaggagaattgcttgaacctgggaggtggaggttgcagtgagctgagattgcgccactgcactccagcctggccacagagcgagactctgtctcaaaacaaagcaatagaaaacaaacaaaaaaaattagggacctgttaattaaaattaccaccaccaccaaaaacagtcatagcaccccaagagaagtaatttattcttttaaatgagaaagggatttaaagaccggagagttactcaacatatagttactgactaaatgtcaggttgatgggaatagaacagtagaaaaaatcctgaaatcctggccctcataggcattcatcctagggatgaccgctgtcatttattgagtgattattataggccaggcactgttctgagcgtgtgatatgtattaattcattgaagccttttaacatcccctcgtagtaggtagtattattagactaatctgtctgtatccgttggcaaattataacaatgaacctgaattactattgtgattttaacccccaacccctgcccagtatttaaaatgtacagagttgtgattggactacaggtaaagcttctcctacctcttcgtggttctttttgagatatgtcatctcctcactcagagactcatattgcagctcctggtcggtcctgcagagcgtcagctcgtccaggactcgccgtaatccgttgatgtcggcctctacgttttggtgaagggtgagctcattttcataccttggggggcatttaagtgaatttcagtgccagtaagactaccccaagaaacagaaatattcaatcccaattgctttaaactgaaaattagaaattgaattaggactgtaaatagtataaaaatatatgaagaaagcgctcctgcattacccccactcaattctgtacaggataattggaagttatttcatcacacaaattccaatagcataacctagttaaataaaaatacaccattttggaattttattttagttaacgtttttccttagttgactaatgatttactgagcatctactttgtgcttggcagtattctaggcaggcagagaaatatattgatattttgtcccaggaatataataactatgtataagttgattgtaacattataatacaaatcctttgcttccttttatcttttaggtgatagttcattctacttgggatgaaatagaaattttatttaacaaattaaataaatagaaacttttttctagagcaggattttcttctgtcacttactttagcctgaaatcatcagcagccagtctggcattatcaatctgcagaatgacattagcattagtagtagtggaggagataatctagaataaaccaaaacagagaacacaacaagtaagtatgcttttatgtgattcattatttcaggaaatgaaaaaggttactcaagtttttgcataaaaatttcacctccttatgtaataatcaaaatgtttcaagtttaacttttaaaaattaaagacatggttttatttattctcatatattcccctaaatttagaactacaatacttttttattcatatgcctatgaatgtacttcaacataaacaatggaactaataacattttaactacattaaaattcatgaatcaaagggcccatttttgaatagtaggaagaattgtttatctaaataaataaatacaagttataacagtcatgaagcatttcttattgtatgtcttttgttaggtatttcttagttttaaatacttgggttagttccaaatctgtgatttctcaccttattcttaagatcctcaattgttaggtgatatctgctatagtcatgatcaagtccacggcaagatccaggtccgtatttttcataccaacccttgatttttctctctaattcagcatttgcctcctccagagctcgcacattatccaggtaggatgccaagcggtcattaagattttgcatggtcaccttctcatttccagagaggagtcccccttcgcttccagcaaagccaatacaagcagcatttccaagggcaccaccagcatggctcccaccaggaacactgcccaagccccctcccaaggcacaggaaaattcacttccagcaacagagccaccacatgcactgctgcctgcaaagcctgcacctccattgaggggtctgacagatccagctccagaccttaagcaaacatgcctggatccattagaaaattggagagacatggtgttttgagaaatgttcaccttgtctatgcaaaactgtaatgtcccaagagaacagaatatcatgcactgataatttctttgggtttttatatatcattattggggcgttcctatttgagttatacatgccaaaagcaaaatggcatcacttagattagcataaaattatgtataattgggtgattttaaaaataattaatgtctaacatccctcggtgttgctttgggctatttcttatcttaaatataatagggtttgttctatattaagtttattaatttaacttctaattttgagtgagtaatcctttcctttcatctagaccctaggcatatactgtcattatctggcgccaggtattatcaaattttttataaagttaagtaagattatgatagagttctgtgaggtacagtagggtctcaattaccatggaggggtataaaggactgctaattacagaaacagatattttatcccaccagaaaaaaatgtgttatttagaaaacagaggctagtgacatctctgttcttaccatgattataacatctatttattatcttggacaatgacacaaatattgacctattattttgtttaaaatagcatggttatgatgtttggtgctctatgctaagtgctaaaatgaaagacatagtgttaactaaatgcagaagtgaaaaatgcgtgattacaatctttaagaaatctattgtcaggtccagacaggggctggatcatggttagctttctgtgctggtctaaagagtttgtaatgaatcctaagtaaaaagcagagggcaaaatgatcaggttgaaatgaaacaaggtggtcaattacaaggttggaataatggtccaggtgagaaggatgaaggcagtggggatgcagagaagatggctttgagagcatatggtaatatgattgaatttggagagtagggaataaggcagaattggggataactcttaggtaattaattttagattctgggaactcataatattcactgagatggggaatagaggaggaggaagacactgagtttaggtttggaccaactggatttgaggggttgccagaatgttccagatgaaggtgactgatagcaagaatgactgtttagaatatgtatactgaactggaaaaatacttgactagcaatgagtaaaagaaaattggagggtccagctctcatttataatgatgttcaactgcatatttggaagtaatcctggtgcaggaatagaaaggatgatgatcagattgatgtgggttttgggatttgaagacaggtccagaagaaggaaatagtggcaaagaaatttctggtgttcttgagaaaacaattgaggcgattgactgtatgatcatatagcaagaagaaagtaaaaccagagggacagatggactgaagaaaagggcagagggtgagtcattgggtatccttatgaggtcatggagcaggcggagtgtgaggaggagattgataaaggtgaaggatgacaggctaaaattggatagtggaaaccagaatttagaattttaaagtaggcacaactccaggtgtcaccaaagtccacagagtagtcatgggagtggaccaacagtcactggaacaagaagtcagaagtggattggacctgaaaggcaagagagtaggaggtcaggaactatctgtctgtgacattaaatgtaccatctataaaggcgtgaagtttctcatgatggcaggagacaggagggaagtgggctgtgagccattgtcaaggtttttggatgatgaggcagaggggagtgtatgtggtgaggggccattggatggcatttgcctcaaaagaggagtcttagcataagaattaagtggcacaaagctagatgtggcattggggatctagagaacacagactctgccttgaagtccttatgttaggtgtgtggaagtgggagcagaagaggagatggaagtgaagaaggaggatggagaggagatgacaagaaaagatgtgggagaaaatgagaggaaaagatgtgggagaaaatgagaggaaaggggagagagatgggaatggagatcgaggatgaaggataagtttctgatagaaaaagttgttaggacaattcagcagaaagtggttaatgctattaaagaatcatttcagttgaactattttgcagagaggtctgcagaaaaggttcatgtaattgtcaaagtgtgggtaaaaagagtttccacctcataagcttgttgaaaaactaaatgagatcatgcttagtgcggtgcctggcaaatggaaaactgtcaatgaatggaagccattattattactattggtgttgttcctaactgggtgtgtgagtgtggagggctgggacatcaggctggaagggaaggagaggtgaccaaggagaagcctccttcctcttgaggccatggctgtggagggtggggatgaagagggttggcagggcaggaaaaaggagggacaagggacaggagacacttggttggacgtgactggttttgagtccacttggttggatttgactgggttcagggagtgatgacaagtataaaattgttttgccaccagaatagtcaggggtggtctcctggaattgccttggcctaaacagtctggagcctgattagctggtgctgagggtggctcgcgtgtggcctctaagatgcattttctggacaaagttgtaggatatttttagagttgcaaagagccttagacatcacctaatttagccccttatttggcagttcagggcaactgagactcagaaatgttgaacaatttgctcagagctgtgagggataggccaggtgaaaacgtggcatatgttcaagttgaccttggtattctggcaccgtgaatatatttagacataagtaattactctatgatgcatgctcatacaaatactttatatgttgccatttgtagtctttttttaaacattggcaacctctttaatatctagagactagatattataaaattaggactcacttgtccagtatgtacacaatatacacagtataacaaagttaaataaaacgcatgtaacacatagggaaatatataagctgaaattttctagcatacaccatccatagtcttaacacgcgtgagttgtaaaatgattctaattgaattgctgagatttagctataaggaattagaatatgaaaatgtataaagaattgcaaatctctcatttattactaaactccaaataataattagacaactcattggtgtaacgtgtctgtatcctttataagtaagtaaaatgtttccaaaaggccattttacaacaagaaaagaaacaacaatgcattgcatacttgaaaattgctaagagagtagaatttaagtgttttcaccacaaaagatgatacagatatggggtgatgtgtgggttaattactttgactgagccattccacaatgtacacgtattttctttttgtcttttttttaacttttcttaatcaaaagaaaactgggtttttttcctttaaaaatgtatacatattttaaaacatcaccctgggtttttttttgttttctttaaaaagtacatatattttaaagcatcatgttgtacaacataaatatacacaattataatttgttaatttaaaaaacacatgaaaacaacaaaaagaaaaaatgacaaactatttctttaaaaagtatatgcttaaataagcggattctccttttcagccagcgtctgtcattaggatcctgaccatcccagttgccgggcacgctcacccttctccttccaccagggggcagggctcgtttacatatggatttcgccgcgcagatgccaggggcggaacctcctctccagcctgggtccctgctgtcctcaggtggaaatgattaaacctctgcaaacaagcagcttcagcatttaattttgtgaagttacagagtgtgataagtacaaagacacgatggccttacattgatatgctgctttacagcttccaaagggatttcttgtatatgatctcatttgaaccttataatgaaggtgggaattaggaagagagaggttttctttccctgttttaaagataaggaaacagaggaaccattcaaggatacacagtgtgaaacgggatggacaaggcccagaacgcgccttgtgtctcagtgaggtggtcctttcagttcataattatcttaaggtcaggtagagaaatgaaaaccaaacaatgcaaaaatctgtctttaatgtctttaatttgtcttcttacaaattctttgcagaatttcgaattaatagcaaaataaaatttttggctacagttctgctatcaggtgtcattcattcattcactcatttgttcagtcaagaaatatttagtgatcacctatttttttaaaacgtttattttaggttcagggatacatgtgcaggtttgttatacaggtaaactcatatcatggggatttgctgtgcagattattttgtcatccaagtactaagcctagtgaccagtacttttttttttttgatctagtgaacacctattatgtgccaggcattgcattagtggcaggtggtaccaaggggaagaaaatagaggccttctcaactctcatggaacttattgtttattggggagttgagccttaagcaaataagcataaaattacaaattgctgtaaaaattagggaaggaaggaatatggaactattaggggaggacctaatttagattaaagcaatccttttgaagaaatgacattaagcagacactggaaagatgagaaagagattgctaggcaagggggtgggcgaagaggcattttgggaggggaagaaaatataaataaaataaagtttttttcttttagcttgagaagagaagggtatggtgccttcaaggaactggaagaaaaccattattgctggtggtgagtgtgcagggagagaggactgcagagggctgcccatgaagagatttattggaccaggctagggattttgaatttgaacccaagcataaagggaagccattgagaagtttaagtagatgagtgatggagaatggatgggaggggagtgagagtgtgtcgggggaaaccattacaaagccagttgcagtaattcagatgagccagggtagttaagatagaagtggatggaattgggataattttggagaatgtctttattgcacctggtaatacatagctgtggtaaggatggggaggacaggaatagagaagaattaaagatgattcttgagataggcaaaataatggccctaccaaaggtgtccacgtcctaacccccagaacctgtgaatacattaccttccatggcaaaagaaacgttacagatgtgattaaattaaagatattaagatggggagattatcctggattatctgggtggacccaatataatcataagggtccttagaaggaggaaggagtgtcagagtcagaaaaggcaatgggatagtggaagcagagacggagattggaagatgctatgctgctgtctttgaagatgaaggatggggccatgagccaagacatgcatgtggcttctagaagctagaaaaggcaaagaaattgattgtttccaaatggtgagtgatggtgctagcatttgcagctatggttgtttctactgtgttgtgctgtcttctgggattatgtcaccaactatcaataccctactaccgatgttgatcagaaataaagattctgggctgggtgctgtggctcatgcctgtaatcccagcactttgggaggctgaggtgagtggatcacttgaggtcaggaatttgagaccagcctggccaacatggcaaaacgctgtctttaccaaaaatacaaaaattagctgggggtggccacgtgtacctgtaatcccagctactcaagaggctgagttgtgaaaatcacttgaaccccggatttggaggttgtagtgtgccaagatcatgccactgcactccagcctgggtaacagagtgagactatcatctcaaaaaaaaaattagcgaggcatggtggcatgcatctgtggtgtcagctattcgggagatgagataggaggatttctcgagcccagcaggtagaggctgcagtgagctgtggcaacagagtgagactttacctcaaaaacaaataacagcaacaacaacaaagaaataaagattctgtagagatatcacatggatcacagttttgaagttgggtacctcagtgtagtatttgtaactacgcccccagttgttctataatgctcttcccaaccttttgaaatatttaatttctaccatccaccaaggctcagttcaagagccacatcttctagcaaaccttccctgacattccattctgatttggatgtcacggtgccttgtccatggtccttagcccccgacatgtacattttctatggcatgtatcacagggaatggctatgtcttaacttattatctccatggcctagcacattgcctgcctcaatgatatttgttgaatgaatgaatgaatgtatcccacccactgaattaaagtctcagggactccaaatccctaccctcctcctggcaaggtgctggggatgattgttctgaaaagagctggtgcaccaagcccttgatgtagttcagcagcttcatccgttgtcggacacagctgtttctgctacaccattcctctgctctgttcatggtggtgaggggttttttttgcaccagcatttgcagcttttatgaagctcccataggtaactgtttatttcagcccttctcttggttcctgagaaagaggggaacaaatagcaccagtgagtgaattggaaagcatttgagtgacactacccagatttgcacctagaagtgtcgtcactggttatgatccagtgtctcaagcccctaaattacccgctgtgggggaagttgctattattgggggcagtctttaacggagtttaggtgtttaccatgaagaaagtcatgaagatggagagctagaaaagttcctagcacttgggagagcctggatggcatgaattattttttccatttttttaaaccccagcatccctggatttgccttgggaggtcttgtagtccatggactcacttgtaggtgactcactgattttgtcactggcttaaccaatatttattgagcctcagcttgtgtgttgagaattgtgctaggtgtgggtttacagctacctatgagtaaggcagacagacctaaccttgctgagattaaaatctaatttacaaaaggactacccaaggtgttaccagggacatgctgacaagattttttcctacgctctgtcgtccaggctagggtacagtggcacaatctcggctgactgcaacctccacctcctaggttcaagggattctcatgcctcatcctcctgagtagttggggttacaggcacatgccaccacgcctggctaaattttgtgttttttagtagagatggggtttcaccatgttgcccaggctggtcttgaactcctcccctcatgtgatctgctcaccttggcctcccaaagtgctgggattacaggcgtgagccactgtatctggccgctgtagagattcttgatacaccaggaatgaaagcctagtcctcaatctctgtgcaaggggtactgctgctgagggcatattttggaagtgtgtgtgtctatgtgtgaatgtgtacacatgtggtcatcataatgataggggttgttgctggcatttggggtcggggagggatgccagacataatgaaatgcatgatacagtcctggacatcaaggaattgtcctgtgttccacatgacttttgaaccatgagctattcatgaaagtgaaaaacctgtttataattacctgaatctggaaacgagttctaagttatgtaaaaacacaaagtttttttttgtgtgtgtgcaaagttgtaactgaatttttttaggaatgtaattgctgtataaatcaaggaagattgtacttaagcttattttgcccagaatttgatcaagggttgtttaaaaaatcccatcaccaacaacattgctgctcattgtatttaagtcagtgatgtgcccacgtttatcagtctctcttcatttgtacctttttgcattctcgctggttttgcatatagatgcaatcatttgactacttcattacatcttctggtacaatcatactcgaacatttccatattgaaatgcaaataattttattacaagttatctttccttctgtttttcttttacatctatcattaacctttctacacactatagattataatcatagataatataaacttcccatgcatagtttctttatcttcttttctttttttttctttgagacggagtcttgctcttgttgcccagactggagtgcaatggtgtgctctcagctcagtgaaacctccgcctcccgggttcaagcaattctcctgcctcagcctcctgagtagctgggattacaggcatgtgccaccacacctggctaatttttatatttttggtggagatggggtttcaccatgttggccaggctggtctcaaactcctgacctcatggtctgcccgcctcagcctcccaaagtgctgggattacaggtgtgagccaccatgcccggccagtttctatatatgatatataaaaatgtatatatgaaacacagaagtgataagtatatgttttgtacatgtgatatttatagtacccacccctgctcctcctccgtatactaggataaactgtgtgttggaaggatatattacctatgaatttcatttctcaatagtaaagggggtgaatcaaaatatttgctataaaaaaggaatgtaagtcagaactactggcaaaatataggaaggagcagggctaagcactacagagcactggtctccaagtaaagtatgtacttttaggagatgcaggcaacccactgggtgggaggaagagggtgtcagaacttctatttaagtttttgtattagaaagtaagaattaaactaaactcatatttaatataagaatgacattggcattctgattttatctttatgtcaatctctcttctcaatcagctcaaaagatattctgagaaaagaatgttcaccccacaatgtagagaagtggatagtgacatcttcatttgcttgcaatgcactgtgacattgcagtttatgtccattgtatttcaggattgtattgctgcttttaatggagcgaatcccccctccccaccagaaacagcaaagaaacagcaactggaagataacagaatcatgaaagcatgattgaagaacaaaaaaatgggacagctgacacttccacttctgttaagagttctttgccagccacattattgggtaaaatataatacaataatcatcataatggtggtattatattccacaagaaatcagctgataaaatttggagttctcaaaaagattatttaaaataaggatttgggtctacagtctttatgctaaatacatgttgtgcattgagctatctgatagtatatatacacatacatatattttatataattttaaaataaatatggacatcttgggggtgcatactcaaatgtttttactgtaataagaaatgtctagtaatcactgctctagaggaaggagctctaggcttgaaatcagaaatcccacatataagacctaggtctgccagctgctatccatgagaccttggggaaatcattacatatttctgaaccctgcatatgtccccaggttgttctgaagatgatttctacatagaggtgtaagtatattgagaattgcaaagatctgtgcacacacacagtgttacactgttcttctatactacttcttgacatactttggtatgtcctgaccgcataacacagtatcccgcacatggagataattataattctaagtagtgtttatgaacaatagagtcttatcactgtttaaatggctttccataattagaacagagtggaaattccagtgtgcttatttcatttttcccctcttaacacagtttccacaaataaatactgtaaagcatggtgttcctgccaagatgtgatatcttagtctttgtccccatttttgcagaaggtaatcagctctactgacagggcagatgaaaaaacagtgaaataatagaaagtttaatttgaatgtgtatgtagattacctgtagacattttggaaggcataggttgctagaggtcatctcaattgtacagggaggactattgcattgtcaagctcccatggcaacctgggcttacttctgtgtagtgctttctaccatgtctgtgtagttgtacatctatttctacttctgagttctttgaaggcaaggactgggtttcattcattatttttaatcactgttgcctggcacagtgcttgacactgcagaaggaatgatcaaccaatacatattttaatgcatactgtgaaccaaggtctatgataggcgttggattgatttatataaattccagttattttttaaaggcagaaaatgatagttgggcttggggagatgtcagtgaaagggaataggtgatgggcagtagtgagactgttacgcattctttttccaaagagaaagtggaagatggacttttgattggagaaaaatcttggcaggaagatcaccatggagcgtagaagggtgaggatacacctaggtgagaggagacattgccgtgagtttctatatttcttttggcttggcatcaagtagcgattacataccaactccttttaactcttcccaccataagtaacccagttgtccaaacattactcattcacattcccaaaccaactaccaaaacaacattccaggagaagcaggagttttaaaggttgtgcgttatgacacctccatcttttctttctaataacaggctgcacaaatataaacgtgtgattacaggcaggctatggttcaactttaattaatccgttggttctatagattaagaatatgattcacaaagtttgttcattaaaaaatccattataaggaaattatttacctgtgctattttttttttttgctataaagaaattttcatgctctttagtcctcagagtacaagctttttttggagctgaaaatacagcagaaactgaccacactagaaaaataaaaagctaaatgttcaattgctgtttttaattttcatttttttttaaaagtcaggtttattgaggtttaatgtgcataaagtaaaatttacctttttttggtgtatagttcaattaattttgacaaacaaattcagttgtacaatggccaccataaacaaaacagagaatatgagaatacttccatcattccaaaaaatcctcttgtacctctttgtggtaaacacactccctttaccctctgacaatctctgatctgtttttagctctctagtttgacttttccttgaatttcatatcaatgagctataacatatagccttctgagtctagcatctttcacttagcataatgcttttgaatttcaagatgtaatgtggtctgtttcttttgtagcatttcatatatgggtgtaccatatttttttccattcactagtttatgggcatttgggctattttcagatttcatgattatgaataaagctgctctaaattttcctcataggtctttatgtagatatttttatttcagttggataaatgtctatgagtgagattgctagattgtatgttaagtctatgtttaacacgatgacaaactgccaaactataattttgcattcccactagcaatatatgagggttccagttgctcagaatccctacttgcacttggtattgtccatcaaaaaattttttttgagtcattctaatagttgtatagtggtatgtttagaatttgtatttccctaatgtctaatgatgtcaagcatcttctttgtgtgcttatttgccatttgtatctcttctttgataaagtatcagttcaaatcttttgtccattttttaattggtttgtggtttttttcttgttattgagttgtagttttttatatttatattctatatgccagtcctttataagatttgtatttttgtgactattttctcccagtctttggctttttaaaattattttgacggtgactttcaatagatgacacaaacaaatggaaaaacatcatatgctcatggattgggtgaataatgatattgggtcaatattgttaaaatgaccatactgcccaaaacgaactacaggttcaatgctattcctatcaaatcaccaatgtaatttttcacagaactagaagaaactattctaacattcatatgggaccgatgaagatcatgaatagccaaagtaatcctaagtgaaaagaacacaatgaaatacaaatgggctatataatgatcaaaatacatgagcagatgtttcaccaaagaggagatacggatggcaaatagccacatgaaaagctgttcaggccagacacagtggctcacgcctgtaatcccaacactttgggaggctgaagtgggtggatcacctgaggtcaggagtttgagaccagcctggctgacatggtgagacctcatctctactaaaaatacaaaaattagctgggcatggtggcgcatgcctgtaatcccagctactcaggaggctgaggtaggaaaatcacttgaacttgggaggcagaggttgcggtgagctgagattgctccactgcactccagcctgggcgccagagaaagtctctgtctcaaaacaagaaaaaagagagagaaaaaaaagaaaataaaaagaaaagctattcagcatattttccattagggaaatgcaaattaaacttcagtgagctataagtacatacctattagaaaaatactgataatgccaaatactgatgaggatgcagaaaaatttgctctcccatttattgctggtggcaatataaaatggtacagcttctctggacaacagtttggcggtttcttacaaaactgaacatgcacctaccatatgacctagcaattatatgcttggacatataacccagagaaatgaaaatgtatgttcacaccaaaacgtgtacacaaatgttcagtctcaaaaggttacatactgtgtgattacacttatatagcattctctaaatggtaaaactatagagatggagattagtagttgccaggggccaggaactgggaagggagtgttgaggtacacatgtgaatacaaaaaggtagcatgaaggagttcttttgtggttatgaaatggttctgtatcttgatttgggtggtggtacaaaaattgtacctatacatggggtacaattgcacagacacacaatttttttttggtttgtggttttttcttgttattgagttatagttttttatatttatattctatatgccagtcctttataagatttgtattttgtgaatacacatgcaggttaggaaaaacaaaaactgagtaagctctgtagttaaacagtgatgtaccaatgccaatttttaaattttagatattataccctagcctatagaagatgtctctatttggggaaggtgagtcaggagtacactggactctactatttttgcaatttccaacgagtctataattatttcaaaatttaaaaaatgtgattacacatttttttctgctttttttttactacttatatggatgtttaagacactcatttggattatttctagtatgtttgttatgggtttaatagtttatcatttactgaataaaccttactttcttagggtttagattcttcctttatcatacactaatgtccatttatatataatcatttcctacactcttagttccagtgatgaattaaattgtgcttcagtttcttcatctgtaaaatggagataataatagtatatatgtcatagagttcattccttcaaaaacgatatttttggtacctaacctgtgttagtcactgttctagtgcctcaggatacatgaatggataaagtagacgaagatcaagcgttgtctttctggagtgtaccgtctagcaggggaaaaggatgactaataatgaatacattgtatagtaagttggaaacagtgctgtgaaaaaaagaaaaagtggaaaacctaggcaataccattcaggacacaggcatgggcaaagacttcatgactgaaaaaccaaaagcaatggcaacaaaagccaaaattgacaaatgggatctaattaaactaaagagcttctgcacagcaaaagaaactatcatcatggtgaacaggcaacctacagaaagggagaaaatttttgcaatctacccatctgacaaagggctaatatccagaatctacaaagaacttaaacaaatttacaagaaaaaaacaaccccatcaaaaagtggacaaaggaaatgaacagacttctcaaaagaagacgtttatgcagccaacagacatatgaaaaaatgctcaacatcactggtcatcagagaaatgcaaatcaaaaccacaatgagataccatctcacaccagttagaatggcggtcattaaaaagtcaggaaacaacaaatgctggagaggatgtggagaaataggaacgcttttacactgttggtgggagtgtaaattagttcaaccattgtggaagacagtgtggcaattcctcaaggatctagaactagaaataccatttgacccagcgatccctttactgggtatacatccaaaggattataaatgatgctactataaagacatatgcacacgtatgtttattgtggcactattcacaatagcaaagtcttggaaccaacctaaatgtccagcaatgatagactggattaagaaactgtggcacatatacaccagggaatactatgcagccataaaaaaggatgagttcatgtccttttcagggatatggatgaagctggaaaccatcattctgagcaaactatcacgaggacataaaaccaaataccacatgttctcactcataggtgggagttgaacaatgagaacacatggacacagggtggggaacatcacacacctgttgtggggtagagggctgggggagggatagaattaggggaaatacctaatgtaaatgacgagttaatgggcgcagccaaccaacatggcacacgtataactacgtaacaaacctgcacattctgcacatgtaccctagaacttaaagtataataataataaaaaaagtggagcagataggggagttgggagattggcaggtaaaattttaagcggaaaatcagagtgggtctcaaagaaaaagtgacaactgtgcaaaggcttgaaggaggtaaggaagaccatcttgttaaagaatattaaccaaggtaacatcaaaagagaaatggagagacatcaaagaattttgatcaaatataattagacttacaatttgatctaatatattagacttacattttaaaaggataactatggttctgtgttgaaaataaactgtagggtagtagctaagcttaaatgagttcatatacatgttatatgtactgagtctacctacctatctgtatctatctatctatctatctatctatctatctatctaatctatctatctatccatccacacatttacccacctacctacctatctatccatccatcatttactcagaacaatgcccggtgtgatttaaaggctattattatcattattttcattgtcaagcttagtttaaccacaactacctcatataaggtagctatcccttattgtataggtaagtaaacagactcagaagggttgaagtaacttgtccaaaggtacataatttgtaaatgccagtgccaggataggaagtccagggatcactgtgtttcagttgcatgctcataaaccatgaataagctctttccctaattcccattctcaaaatgcaatatagatgagaaatattagatgcatcctatttaaccttaatcgagttacttccctgataaagatgaccctaacaaagctatttcttcactcccaagcaaaatatcaagccatcatgggcaccaagattagggtgcaaagcttttaggcctttagcatcataagagaacatctttggggaaacaggattttatcgtgtaatattttttgacatgggtgccgaattggctctgccaatctaattaggcactaccctgcttaaatagcaggattctgtaatgactttagaatctgtaagaatgcatacagaattttttgattaataggtacatgcaaatttatttggtaaaaatagtgccctgtgctatttaataatttttaaaaataattctgtaattttttttactataaataccaatgtccttattaaagacaagtggcttatttagacagattatctttattaaaccatagtgttgggcactgcggcatgtgcctataatcccagctactcagagactgaggtgggaggattgcttgagcccagttcaagactagcatgggcaacacagtgagactttgtctcattaaaaaaaaaaaaaaaaaagcaaaaacaaaccatagttatccaagtccaatcaagaaagcagctgtttatctgagataaagtatttactttatcagagagaatataaataattgtttaaggaggtattgcaagattgaaatggtaagaagacaggaccacgatgtatgcagacttttcaggaatgaaagtttgggtcaccatccaaccacatagaggactctgactgctaagattgtggcctgggggaggagggcagaatgggtagaagagacaaacttaacagcaagcactgctatctcatagtaacatatgtgtacttgcctcgtatcagtggtattgaatataaaaaatctatttcttcagaataaggtgaatggtaacctcagattataagtacaataggtcccggggatttggttaaccttataatacatattttaaaagatggtgtttctgaacagcaggcagtatagcactatttacacagtaggagttcagagtccttatacagcgacgtaaggacttcacagtgtttcagggctctacgcagtgaggcgtgttgggacttcaatagtggatctgagaagactggctcccaaggttagctggtacaaatatccagaggcatgtgagcatttagacatttaggcatttagaggcacaggaacgaaaatggagagcctctgggctgtgctaatatttggtgctaagcaggttatgaagccttgactatagggaaatccatcccattgaaacaaggctcctgtcatcaatttggggtacagagggtagtgtctacagagtggagtgccaacaaatggcatggggatcagggctcagatctggagctcaaatcaaggatactgaggaaagctgctacttggtggacatgagtaatccaagaactcatcagaggacacaaggtagtctaagggacacgccagcttattcccttcataggatccccagtagagtactaagtaatgttggttgggttcttattggctgagggatgtgactgggctatgaaagtacaaggtctttagtcctgatcactgggcacagttggggaaggcagagacctagtggtgtccttttggttacactggcatcactacttcctgacagcgtttctcacgttcatctgatggacatcaaataattttgttgggggtgatatgattttacttgggtggtgtcagaagatatgtcaagctatataacaattgggaagaagtaatatagtaactggaagaaagtaagaaaaggcaaaggtgagaagtcaggtaattagaaaatataaaatttccaattattattattttgggggttttatttgagatattccagaatttccaggattgaaataatttaaagccagagagctgggagccttccacatattgtgtatcttaaagagtaatattggggatttacagactttactcagtgaatttactgacggtggtctgaacatacatgattaaaaaacttagaaaaggcatgacaatagttctgtcttccgaatttctggatacatcaaccttcaactgctatgggttactaatctttaattttaaagagtattatgtacttaagtaaagataaattctgacaaattgggatagtttgcatcagtaagaaagtttattgaaattcattagtaaatgagaacagaaagttgtttttctttccattaaagaacactttctggtaaagtgaaaagaagaaatacagaaaccacaaaacaccttgtagacaccttattttcaaggtctatttccatagaccatcaagacagaagtgttttcttggagactttgttttccatgcatctgtaaataatggtctgtgtgaagggagactctttcctcttgatgcagtttaatagtagtgtttcttggtttctgattcaaccatagatgaaagaactctaccgtcgggcgccacctcttcaataattgtcttgattactctggttttgttagtatctgtgtgaatgatggaaaaaaaattttaaacagtctgtagggatccttagtaattaacaagcaaatattgtaaaaagaaggaaatttcaactttacattgttaagcccaaaaaaatgcttaaggtatgacattttgatcatgccatttttcacggctggtgttaagagtagtttgtgaacaaatgcaaacggaaccgtctctaagatttttaattttttaaaacaactctagagcttaaagcgcaaaaaaaccatcacaggaagttaaaactaattctgattaccccagctagtttctgctgaccttggtcccttagatgaagactcgcccacggacccggaagaggaggacttgtggcctccgctggagctgccgccgccgtatccgccgccggagctgctgccgccgccggagctgccgcccccgtagccgccgccgccgccgccggaactgccaccaccgtagccgccgctggaactgccgccgtggccgccgctggagcttccgcccccgtagccgccgccggagcttccgccgccggagcttccgcctccgtagccgccgccggaactgccgccgtggccgccgccgtggccgccgccggagcttccgccgccggagcttccgccgccgtagccgccgccgaaacttccgccgccgcgtccgccgcctccggaactaaacggggtgaggtcacattcggttatctctaacgttggaaaacggtgggtagctttccagttgccgttaatttagaaaataagcaaaacgtgttgaaaaaataaaaccctgccaggtatatattttaaaacccatcctttgaaaacaatgttaagttcacagaactcttaagaatcattttgggccaaattcatgagaaagtgagattgcggttgcgtactcctttttctgtactctaccctctctcctcccttcctctcattctctggcatcttcttggggtttagataagccttgctatctggaatattgaataaaagaaactgggataacttttcattttaaaatttaccttccctctccttctagcaggctgcggtaggtttgaatttcattctccagtcggatcttaatatccaggagttgttggtattcagtattctggcactcggtttcagctcgaatctgttgcaactgttcttccagagcggatatctgggcctgaatctgtgagagctgcacacagtagcgaccttctgtttctgccaaggaggcttccagggattgtttctgaaacggatttttttgtggcttagtgacttccttgttcagttgagtatggtgacgcttatttgattatttagtaaggcattatatagaagaataagaaaatgaacagaatttgttgtatgtttaatggcaccatttcagtttcagcacttttagatcaacactagtagtacttttcctccattaacatgagcttcactttgttttctctttcttacctccaactctgcatttttttgttgcattgcatattcttaggtgagcatgaaactttgtatgataaagttgaagtcatttcatgagagttaacataccaaggccagttgggactgtagttctatctccagagcttgtacattacgtctcaattcagtaatctcagatttatagctggatatctgttcaatgttattatcaatttctgtagtcagttccttgctctagagtattaaaaacaaggaaaagggtgaggaaattctgaaatgataaaacctccatgagtttcactataaggaagattactttaccttttcattgaaccaggcttcagcatctttgcggttttgttcagcaagttgttcatattggcttctcatgttattcagaagttgagtcagatcaacacccggggcagcattcatttccacattcacatcaccagtggacacatttcgaaggtctttcatttcctgtttgaggaacagaaagatttattggctacacgaggaccataatgaactctcttttggctgggaaaagtataacttttgtgtcacctcctcgtggttcttcttcagataggccagctcttcagtcaggctctcaatttgcatctccaggtcagccttggtcagggtcagctcatccagcaccctacgcaggccgttgatgtcagcctccacgctctggcgcagagctacctcattctcatacctgaaacaagcatgatatcaatactggttataacttatataggggagatgtatctgggcagagactatttaaaaagcagctacatagttgatctcatgtaatggcaatatttgtcatgtacagttctcttagaagtaatagtggtttaatggaaaaaaccttagcagttactttaaaatgcattttcttcctttaatattgccaaaaaggtaacactgacatggaaaatttctcagataactccaatactatttaactttgggtgaattcagaaaaatgtaaatgttattgagggcatcccaagtcattgttaaaaaccactgatgtattcgttgtgatagtattatacaacgatcacttaacttacttcagcctgaagtcatcagctgccagcctggcattgtcgatctgaagcaggatgttggcattatcagttgttaggttgagaatctggagggagaggcacagttatttgagaagaggtcagatgcagatatggcttttgtagtgacatagatgcactctgcacttttatgttgttctcttacaaaatcttgggaaaattttttattttaaatatgaaatattgcaggcttacccatatacttaactttgaattatttgttctcttggaatttctccagtcttgtatttctgtacacgaattattcctttctgaaaactaactggaattatatagatgtattcctgtaagtgtgccctcctcttttagactatgtgatttccatgtatttcagccatgctttggctgactcacacctgcatttgtttaactcatgataaatactaataaataaatacactctgaactggtacacaataggtacaattcagaaattccttagaggcaagcagtgtcccattttcatactggaaaatttatttttcttgccatgttggtactgaatatggcttgttatcagtctgaataacattttgttctgattcatatcatgattttttttttcagtttctacatttgtaaatagcctagcatattttaactgtggactcattgtatgctcattaaaacctcaaaagtgcttagtaaatctcccatcctcttaagacaagtagcacacttgctggatgaagattgccatgaccatagtttcacagatgtttatctttgatgagactgggttatttttgaaggaagaaagtaacatgggtaagcatagtgaacagccacattgtgcttaatttaagattcatctgtctggattacatggacaagatacttaaagctggatttaaaaatacctcttacctgatttttaaggtcatcgatggttttgtagtatttgctgtagtcacgaggctccccctgatgtgagttgccatgcttttcataccactccttgattttgccttccagctcatagtttgattcttccagagcccgaactttgtccaagtaggaagccaggcggtcattcagattctgcatggttactttttcatttccagagagaaggccaccatctcctccaaatccaccaccaaagcctcctccaaagccgcctccaccaaagccgcctccaccaaagctgcccccaccaaagctgccacctccgaaactgccccctccaaagatgcctccataactcccaccaaagctgctacttccatagcttccacgaaagctacctccaccaaaacctcctaatcctccatagccacctgatgagcccccaaagcagcccccaccagagctcccacggctaaaagagccaccactgaacccccctgagctaaatcctccaccaagggagcctttgctgctagaaattcttagggatgacactcctcctcctcctccacatcctcctcctcctcctcctcctccactgcgggaggaagagtagtgcttgcttgagctgtatcgaacagacatggtgatgctgtttagcccagggagtgcctgctaccaaggacagtgacaagcctttatatactgagagggtgtgtccacatgtgttagagtttgcttacttacattgttttctttttgccaacttagcatctttggcttatgattgcataaattatcttcagtaataaccaatcctaatatgtacaattttgaatttgccctaagaataaacaggaggtttgctatgttgaaattgaaaatgggtggagttcagatgagcatgttttattatgcttttcacctgttgaagaacattgagcaaccgttaagatccatttttctcagcactaattcaggttgcatagaatgtttgcaaagtttagaaaaaaaagtttcagctacaaaattatagttaaaataagatttttcaaattcatgttttaaacagttttaattggagcaacaaatagcataaagtctggcaggatcatgctacaataaggttcttgtagacaactgtagggaatcaaaaagaaaaagtttctaaaaatttaactagcatcaatagttgccacacataaaacattaaagccataaaaccacaatttaggagattgtgtttgtaggagatcttttaatttatttggcaaatgagagtatattgatattttgcctaagaaagtggaagtaatgattttagaattttctaattaatgatggcattatttttaacattaaaaaatctgaaatcataaagttatcctggattattttgcacttttaaattcatcatagttaaggtttctgtgaagaccataataatgcagaaaatctgcattattttcttagcatgaaatccgaagaactaacttgtagtactttacactaagttctgattgagtaaaaagggaaaatttggatatgttatgattgcaagtaaaaatttgcttgcaaaaatgtaaatctatattagagaatgatacttgcaccaaatattatgaactagactgtgcacatgtgttcccaagctaggttcagtttctcaataaaaacaacacattttcttggatatactgtgtacagaatttggtataacagtttgtctagtgaagtaaattgggattttggtacattgtataagattatatctacccataggctatgacattgctgttgtttggatgtatatattcatacatgttttacaattatgtagtgctgtttgtgatactgtgctttaaaaatttctagaacaagctgttgagataggaatggtggttattattatttcttttctttctttctttctttctttctttttttttttttagacggaggcttgctctgtcgcccaggctggagtgcagtggcgccatctcggctcactgcaagctccacctcccgggttcacgccattctcctgcctcagcctcccgagtagctggggctacaggtgtgtgccaccatacctggctaattttttgtctttttggtagagacagggtttcatcatgttagccaggatggtctcaatctcctgacctcttgatctgcctgccttggcctcccaaagtgctggggttacaggtgtggttattgttatttctaatttatagaagaggaagttgaagttgagaggttgtgattttttcctgaagatatgtaacaggtggttgaactgcaattagaagcttggtcttttaactccttggttcttttccactttaccaatgtgtatatatattatctgctccagtggatttggtctaatggagatgaatgactctaattctcaccgtaaacttctccaaatggggaaaaagagcaaaacaaaaagaacttagaatcatgaaaatattcaaagggtaatgatttggcacacactctacctttagtaattgttttttcaaattaagtttattgctgcacattttggtttatgaaaactacagaaatagtttctgtagggaagggagtgtggttgggagcattaatcaaatgttgattgttaaagtggaggttactacccagcagattgcaactcttccaacttgttagcacatgcaaatggggcagtagttaaaagaaaaactgaaacccaaccatgggaattgattcttgatgaagataacctacagttaaagaaggctatgataaatcaggataggaaaagaaaaaactccaataacttcagagaacatgttgaaaccttgatattaatgaaatctttttggaaagaaacattttaattaaaaagatattttgattgattttacctgtaattagcacaagttttggatcttagtattaccaattttgttttagtattagcctataatttctccccccagtggaaaatataaaaatcccagtctcctttcagttaattaacaagtggtatgaagagagctctgttacaatcatattaaaccaaagaatatatgaaagggaatctttgcataaaagtacataagaacaaatacaggtatggagggccttctaatactataacatttaatttaagctacctttactgttattaccaaagattacttattaacttgtatactgtagaaattgatttgtctttattcacactgtcatttgttgaaatcagcctttggcatgagtaaaattaagagatgccacataataattctacagctaaattggatgaacatttatgattctagtcttggcaccatttacacttgattgctataatccactgtaactgtattttcattgtgctcaatttttattgtgtctctatgtaaagtgcattggtaggtatttaaaatatagaaaaatgaatgagatacacctcccgtccttatggatcttgccagtagttacagtctaattgaggagacatgacatataccatcagtttaagcactgtatgctatataaatggaaaatgatggtggggcttggatgtgtagggggaaggagttaacatttccggaatatctctatgatctagatggtttacttttctttaatcctgccctaggttctctaagataggtattattatctcgtttaatagctaaaaaacctaaaccttaaaaagttttagaaatttgccagattatgtatgtatttgtttatttatatatcagcagtgtctgtgtgatgacacacagcctggttttgaatcaagagatacagttacaaaggtgctagttttcatgacaccagactggcattcttaagactaatgagcaaggggtcatgttggaatggggccaattgacaaagtttcatggtgcagttgaaatttaagctgagtcctgtaaggatgagtaggacttttcatgtgtgcaacagcagagagaagacttctgggaagtcaggactgtgaaaatgccaagcaagtggagacactgagtgaccagtttggctggagtagatcatccgtatatgttaatttattcataccttcagcaggttttattgagcacctgcaatatggcctggggaaggcataggtgaccaagatacagctcctacccttcaaggagtttacaatctacttggagaggcaaacaaacatacccacgaatcagagattataatatagggtaatctgggctatatttgagcaatgttcagggttccgaggaattacagagaggttgtctaacagtctagtgaatgtgtgtgtgtgtgtgtgtgtgtgtgtgtggtgtgagtgcacaatgaaagaatattgaagtaaagttcgggattgaggatgagttttggtttaagacgtgaatttgaggtaataccaggatattcatgtaaacatgtctttaagcaattatgggactgctgttaaggagagagattcagaatagcagattttgggggtagttaggatccctaagggaaggaatttagagagaaatgtacagaaggtctaattctgaacttttggagtcactttaggggctgggaagaagaagtagagctagagaataatcctgaaaagaaggacatctaggaccagggaaagggggaaagaggatcagtgaagccaagggagaagagaacgtgggtgaggtgatcatccgagaggtcaatgaaaagatggattgaggaaagtaatttggaaccattggcatccttccagaggacaattttaattgagtagtggtggggcaattcatgatgcatacccaatattggaattgatgactttgcttatggtattttattttcatgttgtccagtttatcaatttcttctttaattgcttctgaactttgagtcgtggttaagacggatatagttgctattcgcatggggttaatttggccggagctctagaagcatgttgtggattcaagtttgttatcagtttgacttgtctcactgttgggatttggatcctttttatttcttccttattttgcttcaagtaaaatccgcttttgaagtttctagctgaaaattctatttgcaagtttctttttctgattgagatataatacatataattgagatataatgcatagtttaggtagttgcagaaggacaaatctggtaatgcaggttatatctcaagatggcaaggttgatctaaatatttagaattttctgttgtttatcacaaagtttaagagtcaggcattttctttttactgttctgtgactgtgcaaattgcttaatatacttttgtgattactacccacagagtcaaaacaaagtggaaaattgtatcattatttgatagatttggtaccctcttctcagatagctaattgttggacaactaagatatcaattgataaagttcatgtcttgtcattggtaaacttctaaaattcagggatttaaaatctacaaacactcctatatcaatttttctgaaacttctgggactgtactgtgatggaagccacaaaaatatggaaactgcttgaaggcttttgagttttgagggtagtgtagcagggtaagtgggtgggctctggggtcagactgccggggttacaatccaggctcccccatttactgtgaggtttcatctcaatgtcctcctctctaaagtagggattataatttttcatactctgtggagttgtagcaggagtcaaatgagttaataaatataaagcgtttagaacaatgatttgcatgcatagaataagcacttaatgaatatatttttgttgctattactgttttgtgatctctgtttctcataggttaacccactgtccaacccacaggatgccttcaaaataggaatgaatgaaaggatagggtgagaagttagaaaatggcttgtgagggaggagaaaatggctggagaggaaagtagggtggggaaaaggtgttcagcttgataacttttgtgataaaccatgccatctgtttttctttgagtgacacttcctttcactttaaacttcatttctttatctcctacatccaccaaggcactaattttgtcaccttctctttgtcatagctaatgtattcgtttctttctgtgtagccccactgtaactgccctaatctgagctttcaccacttttctcgaagattacttcaccagcttctgaagtggttttcttgactcagcactgtcaattaagatctgttcactgcggcagggttgatgttcttgaaacagtactgtcatcacttcatcaacatactcggacctcttgtggatggattaagtcttctccataaccttgcccgactctgtctgtccaacctcatgctccctgcggtgagtcagggtggggagtggaaggagtgctacattctcttcataaagtaattatgtggccctgggcaagatactcagctttccgtgtctcagtttactaccctataaaatatggatagtaatgttaaatattaaaatatggataataatccatgattcagtgaaaaaatgtgtgttagcatctcctttaagaatcctttaattacttaatcctttaagcaggcctttctactcttggctaagatactatgctttgttccattttaaggcttgtgtttgttgctcttggcttagaatgcccatcttctactttgctgtttattcaagttattctacctcaactccagactctgacttaaatgccatctccttcatgagacttcccaccgttagtctgtagttcacggctgtctctttcttctcatttcctatgttgaacaacttggtgttttataatttgttataatattctggcctctttattagtgtttccaatgcaatacgacatttaagttcctttagagaagggagggtgcctctgttcttgctgcacccagtactcattgttctctgaatgttttcgtattgcctcagtgcctttccccactttctttgcctttatttttttctccaaactcttggcctgtatgttttggcaatagtgcaagttaaaaatttaaatgaaggctggttgaagacaactaatttaattttgctttaaaggaaattatgatactttttgatgtaagaatatgtaagaatgataagaaaaccaagattctgcataggaattttaaaataccttaaagtatataaagatatattccttagaatggaaatacactatatatattaagaaaacattttggccctcactttttcctcttcattaaaggtcactttttttttgtcttggatctgttgagattatcttgatactagtaacctgctaaaatatatctgtagttttattctaaaatttgaatttttttcatacatcacatcaaattaaaaagcttctgcacagcaaaggaaacaatcaacaaagtaaagagacagcccacggaatgagagaaaatatttgcaaactatccatctgacagagggttaataaccagaatatataaggagctcaaacaactcaataggaaagaaaatctaataatctgataaaaaaaatgggcaaaagatctgaatagacatacaaatctcaaaagacatacaggctaggcatggtggctcacacctctaatcccagcacttagggagactgggatgggaggactacttgagcctaggaattcaagaccagcctgggtaacgtagggagaccccatctctacaaaaaataaaaataaattagctgggtgtgatggcatgtgtctgtagtcccagctacttgggaggctgaggtgagccatgttcctgccactgcactccagcctgggcaacagagtgacctcaaaaaaaaaaaataagaaaacatataatggcaaacaggtatgtaaaaaggggctcaacatcattgatcatcagagaaatgactcaaaactgtgcaatgagaatgtgattctcactgcagttgaatgaataatgtaaattattacagtcacagtaatttgttgtacaactcaccccgcttaaaatggcttttatccaaaagagaggcaataatgaatgctagtgaggatgtggagaaaagggaaccccctcgttcactgtccttgggaatgtaaattagtacagccactatggagaacagtatggaggttcctcaaaaagctaataatagaactactgtatgatccagcagtcccactgctagatatatacccaaaatcatggaaatcagtatatcagtgagatatctgcaccctcattttttttttgcaattgtgttcacaatagccaagatgtggaaacaacctaagtgtacatcaacagacaggttgataaagaaaacgtggtacatatgctcaatggagtactattcagccataaaaaagaatgagatcctgttattgcaacaacttgactggacctggaggacattatgttaagtgagataaaccaggcatagaaagataaacttctcatgttctcatttgtgggagctaaaaatgagaacaattgaactcatagagatagagagtagaaaaatggttaccagaggctgggaagggtagtgtggggtgagggggctgggaagtggggatggttaatgggtacaaaaatataattagatagaacaaatataatctagtatttgatagcacaacagggtgattatagtcacaataatttattgtacattttaaattaaaaaaatattattggaatatttgtaacacaaagaaatgataaatgcttgaggtaatgggtaccacgtttacctgggtgtgattattatgcattgttgcctgtattgaaatatctcttgttccttctgaataatacagttaccatggacccataaaaagttaaaaattttgaatgttttttatattaggagaattgacaattctagttgggtttctggctaggtagcctatgagtatgttgtaatttaaggattaaatataatataacttagcttttaaatttcattagtatgtcatgggatttcttttcaggtaaattaatttcattttgtaaaagacaattgctcactatgagttagcgcattagtaggataattaattaacatataacataaaatagaaatgtaatatcccttttagttttcataaaaaatagtgaagccgaaagtaccaaacaattctctacagacccattttaaaatattgaaactgaacattgtccaaaattcagtggctgttttctccccctcataaatctaagaaaattcctttaggtccagctgtggttgcttgtccaattggtcatttcaaggatggctggatatgagagaaaataacattataattgggtataacttcataatttttacttagagagtctggacagatctaaatagagtagagaaagttttggattagaaatgatacatacagaggttaaggtttacagtgaaagcatttaatcccccactctagtgattttaagtcagtatatgtaacatgcttaaatttaaaggaaaaagtcttaaggaatcaaattaatttcctaattttaaaggtttttaaaaaatacttgaccttatggactcagacaactagtcaatttcataataaatggaccctctgtctttgaatcactttttttttttggtaagggggttgtaagaatggtagaggaatagatttaaataattatttaaatgtaacacacaatagtagcagagaaaataattatttaaatgtaacacacaatagtaacagagaaaatgtaccacaaccattctgtggcttctttcacaaggctgacgactgataatctccaaagaacttttgatttcttgtattaaacccattaaacaaatatgcaaataacatttgcaaagtcagtcctaagatagagtttatagagcttgatgagacttttttatgttccaagacctgttctaaattttacttgcatttttgtctcatcaaatcctgttggcaactttatgagggaaattttattttattttatttattttgagatggagttttgttcttgttgcccaggctggagtgcagagatgcaatcttggctcaccacaacctcagcctcccaggttcaagcgattcttctgcctcagcctcccgagtagctgggatcacaggcatgtgccaccatgcctaataattttgtatttttagtagagacgaggtttcttcatgttggtcaggctggtctcgaactcctgacctgaggtgatccacctgcctcagccttccaaagtgctgggattacagacgtgagccaccacccttggccagaaattttattttaactaaaattagttggccaggcgcagtggctcacgcctgtagttccatcactttgggaggccaaggcaggaggatcgcatgagcctaggagtttgagaccagcctgggcaacatggcaaaaccccgtctctacaaaacacatgcacgcacacacacacacacacacacacacacacacacacacacacacacagagcctggtgtgatggcacatgcctgtgggcccagctactcaagagggtgaggtgagaggatcacctgagcccaaaaggtcaaggctgcagtgagctgtgattgcaccactgcactccagcctgggtgacagagtgagaccctgtttcccacaaacccctcaaaaaagaaaagaaattagttaaaatttagcatgcccaaaacgattcaataaagggactttggtgggatttgaacacagacctatcttcagagctttttaaaaacacaatgattaacttttttctttttttaaacacactgttgctggcttaaactgagtaactcctaaaactcttttgaaatgagctaaaattgtatttttcagttatgtgacttggaaaattaacaagaacataagggattttagtttctttttcagactagacaagccttccttatcatacttctgtgatgaaaaaaatagactaatttgaaaagaaaaagaactaatgaggcaagatatcctgccctggaagagatcagacttgtaggccttgtctgttcccaggagagactctgcactaacttcctgagggtccgtctggcatgggttaatgaaggttcctaactctttggcagaccagtcattaaaataacaaatcacagcaattagccaccatgcataattgaagcattaatccttttataatgctggctttttcagatggagctaacacccattatggagattaaccacttttcatcaggtttttaacttaagtcgtgaggaatacaacggtgaacacaaggtgtgtatgtgaattaatttagtagtaaactatgacatggaggggttctgttgctttgaaagtttccaacttatatacattcaaaagctattaaactttttggtgtctctccaaatattttccatattgataattttggttgaaatgtagagctagttagaattttctagtctaatgcttagatataaatgagtgcatatttgcagagctataagatgttgcattatttttttttcttggcatctggaatataaatgctaaatttggtctagttagaatttcctgcttccctccctcccctgcttccttccttccatctcaaaactctccaaggatgaagaccccacaagctatattggggtaacatattgtaacagtagttactttcagtttctgtcaaactagattaaaaagaagacaagtattacatgttctcactcatatgtgggagctaaaaaaattgatctcatcgagataaagaggagtataatggttaccagagaggctaggaggatagtagggaggtgagggagagaaagtaggggataaagagggttggttgatgggtacaaacttacaattagaaggaataagatctagtgttcagtagcacaatagagtgactatagttgacagaaattcactatatattttaaataactagagtgaaattagaatgttcccaacacaaagaaataagtgtttgagatgatgaatatccccattatcctgatttgatcattacacattgtatgcttgtatcaaaatatcacatgtaccccatatatatgtataactactgtgtatccataaaatttttaaaaaatttaaaagaggaaaggaatggaaaataaaagtaaaaagatgattcatcaaaaattacattgtagaagaagagtgcagaatggcataaactagtaccacatagaacttaatttgtaattgtgaagaaaccatgtaagtatatttactcctggtattgtgtctttctctcttatcctaatttactgttcctctatagtttaaaattaaagaattgcctttaaattttacagggcaaactaattatactgtggagacacaaaatgttttgagacatctgtgaccagacatgtcacgtgtgaatataccattggatttcaaagcaacacataattttttttttttttccttttacaacagattcattttattttcatcaccatgggacgtatcctgttgttgagttctctgggtcagacctctgaagacttctcagatggatcctagtctctgggcttgccctgaaattactcgctgctcagggagagagttgaaatggttggcatcctcccactctgttgctccggctgtgtcccctcgctctgttgttccagctatgtgccctctgttgctccaactgcagctcattctgttagagttcctcattcagctggtcactgtggccagagggtgttggcctgctcccttcctcaagtattcttaaagccatggatttttgtggagcatttttcttcctggctctcccttgagttattttcctttcttcgctatcttgggactcttctttgtgcttgcggtcatcggttgagagaaggacttcttcttccttgtctccttggtgttggctcgtggttgctcttcaacaactggactggaggctcttggttttctcttcatcttcaacaagtcagtctctctcaagggtctcacgttgcagcattcttaccagaggccattgggcctggagttccagttccagtgtctggagagtccacctcagctcagcaatctcatgccggttggcaattgtcagcagaagccgatgcctgcccatcagttctttactctgaggtgttagagtggaataaaaatataaatacttatactagttttcatgacttctgcttaatattgggtatttttttgttttgttttgttttggcggtgataggcttaccttacattaaaccaggccttagcctttctgtggctttgttatggcaaagcctcatattactctctagtctggttcagcaggacagtcaggtccacacctggggctgtttgttttctacgtttacctcaacataaggtaccttatcattgtcagccttcatctcctgatccaaaataaaataaaatgccacaggttacttgattttgcatctggaatatgattatttaaagaaattaaaaatttaaaactgaaaatgtagagtttagaaatcttttttaaggtttcaaaaaaatttctaggagacaacaaaatagtgttactagatttagcaaataaaatacagaatgccaattaaatttgaatttcaaatgaacattgaatactttttttggtataactatattccatgcaatatttgggacatatctgttatattattcattgtttacctgaaattataatttaaactgagagttctgtattttatctggcaaccttattatgaaaatatttaggatcaatataaaggaataatatttttaatttttacaaactattttaatataagtaatttatttgattttcattgtcatcctgagagttaagttttgccttacagtctatgttactttacctgtgttttatgaaaagactgtctcttataatgatagccaccaccaccatatcttgacaagtattgacatactgaaactttaaattcattttgtgtagttcccgcctcttcatgattgtttctgaggtaattcagcttctccgtctggctttccattttcaactctaggttagtcttgttcaaagtcaactcatctaagacacttcgcaggcccttgctatcagcctcaacacagtgataaaggacaactttactctggcatctgaacagagcccaattggaagaatcaatacagcttagatggaggtctcctcatccagtggtaataaaacatcccacatagtggagcttagagagcacagcactgggatgtgaagacatgggttcaaattgcacctctgccatgttcagctgtcaccttgggcaaattacttctctgaaccttagttttctcatcattaaaatgggaatattggttttttgtgtgtgtgtggttttttttttttttttgagacctagtcttgctctgtcacccaggctggagtacagtggcgtgatcttggttcactgtaatctccgcctcccaggttcaagcgattctcccacctcagcctcccacgtagctgggattacaagtgtgcatcaccatgcctgactaatttttgtatttttagtagagacagtgtttcatgttggccaggctggtgtcaaactcctgacctcaagtgatccacctgcctcagcctcccaaagtgctgggattacaggcgtgagccactgtgcctggctaaaatgggaatattatgagaattgagttaatgtgcaaaagtgcttagcacagcatcagtatttagtaaatggtaggaataacattattaaagccatgaaagagtgaaaatctcccctctgctcttttgactaggaaaggaagcaagctccttttcacgtacagtgcaatgcacctttgttttacaaggactgtgtctccctagttaaaaaaaaattaaagtacagtatgggggacctcctgcagttctataaaaaccaagtctctgacctacggattggagagtcatacaccatacatgagatttcaaatcgctagcctgggaattttcacattgctaacctatgaccactattgtaatttaaacataaaagagattgttttatgttgagatgtttaataatgtgaaataatgatattgtaaattttgtagtaactgtttaaagtggtgaattggggaggttttttttttttttttttttttcagttctttacatggtttctgacttacttgagcttgaagtcatccacagtgagcctggcattgtggatctaatgcggaatgttggcattttccaaagtaacattcgttaccttcaagggaggaaaaggaaccatataatttaacaaaatatgttgggtgccattaggtccagattatatacttcatggatttcaataattataagtttgtcagtcatatttgtgctagtcatggcggctcatgcttgtagtcccagcactttgagaagctgaggctggaggatcacctgagtccaggagttcaagatcagcttgaacaacatagtgagaccccatctctacagaaaaaaatttagctgggaatggtggcacatgtctgtagtccctacttgggaggctgacatgggaggattgctcaagcctgggagggtgaggctgctatgatcgtgccactacacacacaccagccagggcaacagagcaagaccctgtctcaaaaaagttatatttgtataaatatatatcagataaacagtaaatttaaatttttctcggactattacagaacttttcagctaaatatattttttagagcttctgaaatacaggataaatgtttctctttcaaatgaatgagccatttcatattaatttttatgcacgttagacacttttctcgacattagatgcattaattaatcagatacaatatatgtttgccaggagaaatgtaagttgtcaaggtagtaggcctggcatttgtttaaattctgtgtggtttttgtctcattacttgaaagaaggccaccaccatcagagtcaccagaatttcacaggcccctatttagtccagcactcatgctactccaccctgtgccaggacccaacctaccctcaacaccataaaagccaccagaaggcccactaccacggccctctgctctcttgagagccccctacaatgacataggttcccctgagcctcaacagactcagagccactttcagtgctgctgtgctgccacaacccagaggaacaagccactgtgtggaggtgtagcagagatctaaggttaaagtatagccccaaagtcggtgcattatggggaccattatggagcctactatctatctatctatctatctatctatctatctatctatctatctatctatcatctgtgtaaagttacatcatctttaatgaatttttttaaagtataggttttttttttggttaacaatctcttcaccttattttagtgattgatgagccatgtgtgctcaagtgctatctcatcagggtgttgggtacatgcaagaaaaccgtgtgtgagcaggaaaaacagagaagaccatcatttcatgacttcatcttttgaaccatgataagtgattactttttgaaacactgcaggcattcctctaacagacatcctttctttccttctgaccctatagtcttaacattctcatgctcttgctcagtttgcgtctatttttccatgaccttccaggcttgctacagggccctttccaaggagtctaagttgagtagtgcatactgctgtagagttaaataggtctttgagttctagcctactgttgctcagcttggataaagttacttatcttctctgaatctcagttttgtcacctgtacaaattacaaaataatttggaggattaatgagaaacaggtaatagtgtctggcacatactaggctctcaatgaatgcttgttctctcccttctcttctctccctggtccccactctagctcacagcagtctctaaaactcataatcctaattataccacacttctttcaagaaatatttattgaatgcccagtgtgtgccaggaagccttatggactattatgggctctggttttatacagttgtcatacatgcgtcttgatcaacatcccttctaagctcagtgtctgagcattgattctagatatccatgaataccctaaactgaacagagttgcctttacactaaactaagaagttggcaaagtttgccatttgtgtctaaaaggcccgctttccttttcttctctaggttgaaatatctctgcacttcatctgaagccattggctttcttgtgctttaactcattttttctgtctagggaaaagacatgatattattcatttacactaatagagacagtattatttgctctatgtcattcaggaacctaggcatttgaattttgagcttttcctttaattatgaaatgaaggattgttccttgtgatagaaatttccgttcttggtgaggaagagagaatttattttgggcagaaatctgctgaaattgcactttgcccgcctaaaagaccagccttaagcaaaagtgttattttgtctgtttagaatacatgtggaggagtagactgaagagaaggcatacatgtctttcttttacccctccttactctatacaaagattatcttccagctcctgtgcccacgtctgagtttagttcctggagttccttctgaatttcaggaagttacctcttcttcagacttccttctgtgacttattcctttcatatctcccaatctatcctaagaatccaaaatgtctgcaagtggaagctctgtggcaccccattccctttgccatgatctccacctcttccactgcaccctgtccccactgcaaggggactgttctgtctttcctgtgtcagcctcctatggccctaagggcccatgattttgttacacttaggtgtacaggatggagaggatgacagttacacatgattaaggaatccctcagaggatgaggagagaagagcatggaaagatagagtcgtctcagctttcatcagggtttcaagaggagacactgattattggggagttagattcaggacagttttccttttagtgttggtgtgtatatttctatagcagagaggaagatgagaattaaacttctatgtatcaggaaaatctgccaacaagaacactaatgtaggtacttgagaactaaaatgagaaaagagaaactagaaattgtctgcatacatgtagtagcaataatctaattcaacatacatgtattgagtgctgaccctacaaagctgtttgcccttccatatcctctttccacctttctccattctgctctctgcaccatgaatttaaccttgccctctggctttcattatgtttgcccagtagggaccccagtggagggagggaggagaatgagttgggggacttattcccctggccacctctacagctttgttggatcctttcattgaacaccacagctcctgtcgagatggccctttctgtgactttcccttcctaaattaccttcctttgttcttgtaggcatgggggtgacactagctcgcctggtggtttccctacgccatacccacacctttgtcaatagtccttttttttttttgagtcggagtctcactctgttgcctaggctggagtgcagtggcgcaatcttggctcactgcaacctccgcctcccaagttaagcaattctcctgcctcagcctcccgagtagctgggactataggcgtccgccaccgcgcccggctaatttttgtatttttagtagagacggggtttcaccatattggccaggctggtctggaactcctgaccttgtgatccgccagcctccgcctcccaaagtgctgggattacaagcatgagccaccgcgcccagccagtaaatagtccttttcttaaatttgccttgacttatcctaatttgagcgtgccagttgtttcctgtgtggaccctactgtatgataggaatttgtattgagtctttactctcaaggaggttgataggaaaatgaataattgcaacaccatgcaataagggttaatacttgcttatcaaagtgtaagatccttgagggtagagaccatacattattcacatttctttcttgagacttagcatagtgccaggtacagagcaggtgcctaccaatgtggaaaggtagaggtacgtatacggggtggggaaaaatggaggatggagttgagaagctgttccaggaaggcccaagtggcttcatggtttaattatgttggtcagaaacagactggttgcactaaacaagaagagaatttactagaaggatatcattggcttctagaatcaatggaaggtaggaatataggaattggaggacaaggagaagctggggtgctttggagggctagtttacacaaaccacagcaaaagtcaaacaatggatatgatcctcagtgtatgttcccacacattggtctcttgttcaaatttcagtgtcccgactggctaagtctgagtggtgggaggggctgctatctcctcctactgcacacactagtactgcacgctccctttcaggggcctcttctgaggagacagcagctactttctacttcatatggtttttattacttagttgaaatgctaacatgttcgtgaccttggggaaatgatttaacacagatatgtgtgtattttaatagtttaggtgaaaagaactgatttctgagacaacttttgataatctttttttctttcaggatgaagtaatgttaattttataccctatgtattgcatcttttgctgataccaaacctttaatggtttaaaatgtgggtctaggccaggcacagtggctcatgcctgtaatcccagcactttgggaggccgaggcaggtgtatcacttgaggtcaggagttcgagaccagcttggccaacatggcgaaacctcatctctgctaaaaatacaaaaaattagctgggcgtggtggcaggtgcctgtaaacccagctacttgggaggctgaggcaaaagaattgcttgaacccgggaggcagaggttgcagtgagccaagattgcgccattgcactacagcctgggcgacagagcaagactctttctcaaaaaaaaaaaaaaggtctatagaatcttcacattttagaactgggaaggatcacggagataatctccgatttcctcattctaaacaagagtaaatgaaattaaaaaatggtgagtgtgacttgtctgagaccacatcttaaccaaggagtggtattgtttctgtttaatgtagtccttatgattgtgttggtgttcagcctgtgtcagaagtagagcgaggccagtagagtatgtgaaccctcaagtcggcatggcggttgccttttggcctaatcgaggtcagaaacatgttgataccctcagaagagatttccccttaaggtccctcctttccttatccctcttgggaaaggatatggagatttctatcataggaagagaaaaaatggctggaaaaggacatagtcacattctttctgtacccataatactctgtgtgtgcctttattattctacttatcacatttatcttggggaagtttcacaaatcacacacaacataacactcccacccagagattcagaattcattccctcccctgccaagcaccactgcaaataaattgttactattgggtatattttgtgtccttgagctgctttaggaaaaaaaaaaattaagaacccctgataagcaatttggagcttcagattgcttttgagaggggcagtgactcaagaaaagtattgcttcaggaagattagcctgttggaagtatactaattggtttgggagagatggagcaagggaatcggttaggagaatgttagtgtctacatatgtcatcatggacacagaaaaaataagctgattgaaagaataataattattatttgattactgattggatattgaggtggtcaagaccaagaaagtgtcagaataggaaagccaggagaaagagtggtttagaagtacagatactgaatcggaaatgatggttgtacattctcatggtcagccttttgcttcaatttctttaacatgtattggtgcaggcttcacagagcagaaaacactcctgcatgcatattgttagctgttcagaagctttctggactttcttccaatccttctctctgttcactgctgcctgttcactgctgcaggtaaggtaggaggaaagagaatatctcaggtgggatctggtaataaaataagaggagatctagttatctgtggcagccttatctattggaactacagaaacaagctcacttctctcctgcttgtctcctcattagataaaaggaaagattatgggggcagtgggtgggaagagtagttaagttacaggagttaacagagttaagtaactatgatgatgagctctttccctgaagaaccaagcctgtgtgccaaggtggggccgcttttgctcagtgtgagagagggtgtttcccccatctctggggaggagtagaggaaccagtacctgctgaggtttccgtcattgttttgctgccctcttcctctctgccgcaccactctcccaccccctgccagctatcctgtgttctgaagttgctgcctggtaccccaaagccacattccagtttagtttgtcctcctttgacttgctccatttgtctgttttctcctctttacatactgagacttctcagcctggtgtgggaataggtattaggaggataaccatctggtgagtctaattcagtctaaggtgtgacttactgactgactgccaaaggtgggtagggttggagaggtattcactgaagctatttacatttttttaaaaaacacacctttgggaggccaaggtgggcggatcatgaggtcaagagatcgagaccatcctggccaacatggtgaaaccccgtctctactaaaagtagtcccagctactcgggaggctgaggcaggagaatcacttgaacgcaggaggcggaggttgcagtgagctgagattgtgctattgcactccaacctggcaacagagtgagactctgtctcaaacacacatgtgcacacacacacacacacacacacacaccaaaaacaaaaaacaccttttatctaagtggaatttcaggcaccgtggtggtaaaaattttgaagaaaatatttttctgtatttttccaattaatacaacttgactttaaaattaactgtagcaggaaaagcactttgttgtctctaggcctcttttcctcaccttctggagggaagggacagtatcttggctctgattgtcctatcttttgtacagttcactgaatatatatcatatgccatatattttactggggttctgaggatgcaaggataagtaagatgtggtctttaccttcaaggaagtcatatcttttgggtcaaagggtaggagacaaggcacaaataattacaaaataggatgaagagtttggaaatacagatttatctaaagtatatgaagcaccagtaaaaagaaaccagtttctggaggacttaatgagatgtcttttgaatgatgtcttaaagaatgacttagaattcattgtatgggaaaaaaaaaatctaggctgagggaccagcaagtataaaggagacataaacacacacgacgtatttcaagaactgagaaaagtttggtttagctgggacataaagtttatgtgagtgagtgccaacaaataagtctggaaaataggtttgtgctacataagaaaagacctgtaatgccattttaaggaatttggacttgatcccttagtcatggagtggaccgttgaaagctgctaaataggggaggaacatgaccttaattttttgaaagataactttgttgacagtgtactagatggattggggggaaactggacaaagggagatgagatgggagaatttgcaagagtctggggaggggaagaaacaatgaaaatttcacaaaagtgtcagtgcagtgataagaatgggaagatagtcatagataaggtggcatttgacttggctgtttgcccgttgatgatggagggcatctaagatgacaagacgtttctagttttgaacttcggggaatgctattgactgatatgtgaatgcaaagggggagcagtttttgtaggaaagataacaaatttagggaaaggaagattgagcctgaggtacctatcaacattcagatgtagatattccataggcagctgcagtgtgggtctgagattaggagagaaattgtgatttggaagttactggcaaagagaaaccatgaactacatgagatttctcagggagaatgagtagagatgaggaccatggataaaaccttgaggagctgcaatatttaatgagaatataaaaggcttgagagataacattgaaagataaaagggagaaccaggggacagaagtttcaagagagccagtggagaggagaattttgagaagatgggatggccaacagtgttaaagatgtcaagtatgactagaactgcaacattactttacaatctagctgtttgttctgaaaagatcctagaagtactgttgtcttttgagaacagggaatgaattctctcaaagctaccaattacagttaatacacattctcagtctttatagtttaagcatcatttaatatgaccaattttgcaaattaaaggatcactgaaattgaaataatttaggaaagagctgaaggccagaaattacctatattgaggtggtagttgaagcctttagaataactggattttataaaggggagagcagaagtttaaggctgaatggtgaggaaaccctcagttaggcttggcacagaggaaaagtacccagtgaaggaagtgaataaggagtgatctggaagtctggaaaaaaattcaggcaaccaaggatggattgtagcatattatgattcacctggtagagtttccagaaggaggttcttccgggtcttgagtttcaaattctgcatagagaccaggaagaatgaggactagaaattaatgtgcatgatagtgccacaagatccttggagatctgggtgcaagaatatactggacaatgtaggggcacagaagccagactgtctgccattagggaaggaaagggtggtgatggaatgaagccatctgtgtcttgcactgctgcagcacacacagtgagtataaaagaaaaaagaatggtgtggagctaagcaagggtggaatgaagacaagatggttgggtgcagaacatactgggaaacagaagcaagtagaattttatagctctttagaggtatttcagaaatgtttcctctgggaaataaagaaaaagagggccaggcgcggtggctcatgcctgtaattccaacactttgggaggccgaggtgggcggatcacttggggttgggagttcaagaccagcctggccaacatggagaaaccctgtctcttgtaaaaatacaaaattagctgggcgtggtggcacatgcctgtaatcccagctacttgggaggctgaggcaggagaatcgcttgaacccgggaggtggaggttgcagtgagccaagatcatgccattgcactccagcctgggcaacaagaacaaaactccatctcaaaaaaaaaaaaaaaaaaaaaaaagagagagaaagagaacactcagggagccaataagccagatagcacaggtaggtacctggaaggagagagaaatcagaaataagagtggttcaagacacagttcaagagctcacatcagtaatataggaaaccatctgttgaatgagccatttaaactgtatcatagggaacttagcataaagaacaggcatgtggtataattaaaaatgactgaaaaaattctgcattttagaagcatcattgtggcgaatgtgcaggaaagtgagtgctcaggaagttggccttagacagctggaaagatatgtccttcattgccagtaaactggcattctaatgtgcacatcagcattgtgtgaatacagtcactgtaagtctatcatcaagtgtcaggttacctctgggcatggtgaagtctagtttctggacctgcagggctatgaggaacagattctggactgtggtaagttttttgaagtaattcaaatttatattaaatttgtattttaaaaaacccttttgataatcaatctagtcttgtgggcagcttttcatttgcttcatgatatattcctgtaccctccatgagtggtgttaggaaaaatggcagtaagtattacttttaacagttagttggtagaataatttactcaccgtattcactaaaaagctgatgattacaaatagaaaaatagttttaggaaatgtggagcttagagagaacaaacacaagtcattcttgctgccactctcctgtactcatgtcagacattactaattgataacacatcttcctgctgaacccagactggctggagaattattcttaataaaattaatccaggaagcccacaaccaattgcctgaattgagccatgtgaataaaaactctgccctttctttctttgtttttttttttttttgagatggagtctcgctctgtcgcccaggctggagtgcagtggtgcaatctcagctcactgtaacctctgtctcccgggttcaagcaattctcctgcctcagcctcccaagtagctgggactacaggcatgtgccaccacgcccagctaatttttgtatttttagtagagatggggtttcaccatattggccaggatggtctcaatctcttgaccttgtgatctgcctgcctcagcctcccaaagtgctgggattacaggcgtgagccaccgtacccggccccaaaactctgccctttctagtgtaaatgagttgctaggaattctggtcatcaaaattacagaattcagctggaaagaacctaaagtatgatttatcttttgaatttaatgtcatgggggaagctaaatatgctctttggccaaaagtctgtggatattctgacagaaataataccagactggataaatagacaaattatcaggatagaattatctagaccaataatacattcactgttatagcttcaaccagaacagaatttgcaaaggatattagaggtcattgccaggcttcaccttccagcattgcctgttacagggtgtatggtaaattgcttaatctcttttaatcttcacgtgagaaataatatccaattcataaatctgagaataccaatttagataacacatacaaagtgttcttctacaaagtgttctacacagtgggtactcatagacatctgtcctttctttcttctcttgttaaatattcaacactaaacggaaccccttatcagatatctccaatctctactaaaatatttctagtgatgagaaactcattgtctcatgaagcacttcaccttcctttgaagtgctctaattattaaaaagcttatctttctatttaactgaaatctgccacacagaatatagctttgctgatggagaatcttttgggtatttgacaagattactctgtgtttctaagtcttttattttccaggttatggatcaccagttcattcaactgttccttagatgacgtggttttcaattccattatcatgtaggttgccttaacttggatcacttctaaatctgtaggattaatctgacctctctttttctgtttctagtattagcttagggaatattttttaaggaatgcctgctaactgtgttttatcccattgcacttgatcaccagcataatgctacttccaaagatataacacagaatttattgttttcatatgtaaatttatagaaactatttaaatttaataattaattattagtaacctataacccccccccccccctcaccactccttggtttcagggtttggtttcagggtggctcaggtgtcttgaacacatttgtaatggaaacttgataaactcctattttgggttcaccctcttttcttgggtgtggggccaaagtttgtcacttagattaactagttggcttgcaagctataattatcttcctcctccaattaaaatcacatttctgtattgccacatctagttattgcaaaatctagcaatacaccttggattcttatttccctctaagcagactttccctgacgattcatattttttcttctgggttgttcaactcttaggtattgctcttgtcccactgctgagtaggacattgtttccaacaaagattgatcattgggtaatttacaatattgttggttttgtttttctgtgtctcatttgctgtattagaatgattaacacacattattatattattatttctagatttgattaatagaattttgggtgactcatatactccagctatacctatgtgacagcataattggatccaaaatgaaaaattcaatcaacatagggttttatttttaattgtgccaaatgaaaggcttaattaataattttcattggattttagctaatccgtttaccggaatttttcaatcatgtgttatgaatgtataaacctaatgtgatatttctaaacatcatttcaacctacatgtatttggcatgcccacattttctgccagatgctgcattaagtactggggacttatttctggatggccaataatacctggcccagcctttgaggaggaataagatacaaaaattcgtcttctaaaaaggaagtgcagactacctgggtcaaggaacttatggttctcagctggtgtgatgattacttagttttatgggaaaacactccagaggacacgctctttggtcctattcttgccaatccactcccatttaataccatatgttgaaattttatgtactcctcaaggctctgctcagatgcctttctgctgtaaagagtggtcctcatatcccagccctttatattacctcccttttccaaacttctgtggcaggtcactttatacctggcgaggcaaggttatttgcatacctgactagtccgctcccatttgcttccatagtgaccagtaaatattagtttgattgagagaaaagtgtattttacttatttttaatttttattcctaactgctagaccaccaaagagagagagcacaatgttttttagatagaacacctcgttattaagggagaacaagttctattttgatctagattggcaggagtattacattttcagactgaatattttcatggaaagccagtgttccatcagccattttaagataactcagttttgtatctatggttaggcgattgcctacatacaaagcacactttaatgacgaattagaggattccaagcttgcctttataagtgaatatctacagatttttttttcttataaatactacatggaaaccaagttactctatgttttgaaagcaacttctagtactctttagatgtatgggaaaaagtcctcaggttaatttccttaagaaaaagcgtcatgaattaaaagactgcttgttgaaactgaagatcactttctactgagtcaccagatattgagcaatatgatttatatcaatatgccttgtgaaattgtcaagttaaagattgtacatattagataagaaaattttgtgtccctatagagtgacaagtatcttgagggttttctggaaatattgaattcaacaaatatctcagtaaaatgcaaacaacttcttgatggattttttagtctcaaacagccagcctaattcctttattaagatttaaggagaaggaagtaagtggaattcaatttcatatgacgcaagcatattttaaatagagtaaccaaaacaaatagattcaaatggaatctatgcaaaccatcctctttgcttcctttgtgatggacactccttagcttctgcgccttaataaggtagggtttgttcattcagtctttccaaagataagtgttggaaaatttagagttaataaatcagtggataaaaattcaatgactatttcaagaaaataatagaagaaatatatcgccaccattcaatgtttgtgcaaccagtgtttattgagtgcttttaatggtacctagagagtaatacaggtggtcaagcacagtggcttatacctgtaatccaagaactttgggaggctgaggtggacagattgcttgagcccaggagagtaatacaggcattattccagcttttactgagtgaatattctagcatttgtacgtaattctgtgcacaggtattcaacaagtattgattgtctcctatgcagtagggtatatgtgctgttttatgcactgtgctagatgccagggctacagtggagggcaaaacagacatggccgctgcccttagagagaatgcagtggtagagccagacattatttcaatattcatacaaataaatgtataattgcaaattgcgctaagagctgtgaaggataactacagtatagtatgagaaggtagaataggagaacctgacttggttaatgaggggcatttgagttaggacctaactggtgactaggattgttaactaggccaaaatgggggtggaggctcattctaggtaaagagggaaagtttgtgagaagctgccagagtgggaaggagcatggcgttagaatttacttgactgtagtattgctgtcactcagtatatgtatatcaaaacctcatatgctgtatatcttaaatatatacaaaaataaagtaaacaagaccagtaggtttggagaagatagagggggagagagggcacacgatttgaaagagggtagagggggccaggccaggccataccttgctgggttttggtctttattccaaggacaataggaagcctttgaaggcctttaagcaatggagtgactggatcagctttttcaaaatgatccccccagctctggtggaaagagtggaagagaggtgggtacaggtggaagctgtgtggtcagccaggagagagacataaatagtggcttggatgaggaggcaaaataccagatatggccaggatatgtataggtatctgttgaatgaatgaataaataaatctagggtcaggagacttggagcttgacctagttaaaaagctacaattgaaagatttttagatcaacattgatagaggaataatttttctttgattgtttagttaaagttcaatttaactgaaaggtaaaagccagttaaaataatgctttattatttgatttttttttctgacaaaatgaaacataatttaaatgatccatagtgatcctaaatagatttttagttcagagataaattatcataaggacataagatgtttggatatatgtgtatagcaagtgttttatgatacatattctacatgttgggaatgtagttttatatgattaagttttcagagtgccaatgctttggaaagtgcagctaaaaagtctccctgtggacaaattggcaaataattgtgtaacctgctacttcagctttgtgtctttggtgttataatattatattgtcctttagctcctcagaaatgatctcctctttaatgcaactgttacctgtgtaccctggaggtgacagataatcatgataatgatgactaaaactttcatcaggttctcctccctactgagaccttcctttcccttgagcagttcttgtcttcccactggccagcgttcagttctatctccttcagctctgcaagctgtaaaaacaccttccatagtcacacaggggaactgagtaaaattctcctaacttcacatcacctgaaggactttttcttacccctagcctctgagtaataacactgagaaggacttcattgttgtgctttcctataacaccactgctggattctgattagcctggatctaattctgtagtactaatttttgttccaggattatctctattggatgctgattatatatatttgtattttttaaatgataaacatttattttattatttgtcagcctactcagtcatatattagataggctagggaagtttaacattaaaattatcatccagaatcagcacataaggctgtttaaaatgggtatccagtgaaaacaccgtaaagcaccttgggaggtactttttatccaatgtaaattgtaatatacaatgtaaaaactgtatgaaactttatcatgtatttgcctttagatcataaaaactgaggttattttcaatagactatgtagagtcttacatatagttggtgctaaataaaagcttgttgaaggaattgaagccatcctcacagaattaagaattctgggcagaaatgtagttataattaagctttaaccaggctgcactttgacccacttccttgtaactaaacatcacataaccttagattctgaccatttgcatccccattgttcctgtagatagaaattctaatgttagaaccatgaggcttttgtttaagaattgcttaaacggatcctgaattactgtggaactgctaacgccaaccaatttaaagactcccacagacaaaccaaatgagcatgagagtacagtttctttctctccctgtcctgggacttcaccctgtactcttcaactaatcaacaatctctatgctttggctcactccaaaactcttaaaaaccctcgccccagagtccccgggaagatggatttggggttttctcttttctcctcatttgttggccttaccattaaacctctgtctctgttgcaacctggtgcctctgggtattgacttgctgtgaacatccaggcaatgaacctattacagctacagaatgaatacacaaataaatgcatatgtgatgccccacttgtatacataaataagccagcggagaaaaccaaacaccacatgttctcactcataaatggaagttgaacaatgagaacatgtggacacagggaggggagcatcacacaccggggcctgtcggggagtgagggactaggggagggataacattaaggagaaatacctaatgtagatgatgggttgatgggtgcagcaaaccaccatggcacgtgtatgcctatgttacaaatctgcacgttctgcacatgtatctcagaacttaaagtataataataaaaaataaaaattacactgcaacttgtcaaaaaagttatacttgttgctctgtttatttgaaacgtgaaattgcagcctgacgtgatttctttaaaatcccatgttacttgcaaataaatgaaatatttcaaaatgagtacacttagcagaaacttagtagtgtatgtataacttcaggagatcaataagtgcaagtcagtaactaaaatgaccatattcttaccaaccaaggtcatagcgtcgtgtgtttacggtgtttttaaagatttcaaaatgccgggctaatgtgattatatgtgatattattgttgtctttttgtacaaagtgagtcatctcaagttgagtaacttgttctgagtaagataatgactcactgagaaagcctgaaataccatctaaatggcttctattagagcccactgctgtctgtggactgttttatcagtgtgatttatttacaggtctgcttctaaattgcgtatttgttccatcattttgaagaagagttgcatttcattaagaatatgtacatagtgaaaaaacaatgacatattttagcaactagaattcgcaatgaatttaattctaaagaagagtagtatgcagaatttttttcctgaaaaagcttgatgctcatgtttttacagtctataaagttaaaatatctattctgagttttgcaaacaatttattgcatgtgtgtaaagcattgcatttatttataattctgctatattatgctaatttaagaaataaaccctaaaatcatgcatgacaattcccaagaatgctaagctttttttgagacggagtctcactctgtcgcccaggctggaatgcagtggtgcgatctcagctcactgcaagctctgcctcccgggttcacaccattctcccgcctcagcctcccaagtagctgggactacaggtgcccgccaccacgcccggataattttctgtatttttagtagagacagggtttctctgtgttagccaggatggtctcaatctcctgacctcatgatctgcccgcttcggcctcccaaagttctgggattataggcgtgagccactgctcccagccccagtttttcttaatttattttatatactctgtatttagttgtagaatcctccccttcaatttgagcagctacattaatattagcattttagacaggcaccgtggtttgcacctttcatcaggcatctgacatttgactaaaatggcagtagtctgaggtgggaggatcacttgagcccaggaatttgaggctgcagtgagctatgagcacaccattgcactacagcctgggtgacagagagcgaccccatctctgaagaaagcacatcttatagtttcaaagtgctttatggcttgttaagctccttcacagaagttggcttatttgatgctcacaacttgtgatagagggaagataaatattattcccccctccccatatgttgggtgagaaaagtgcactttttttttttacaaaagtggaataatttaggattgtgcatgaagggaagaaaaagaataaatatgtctgggggaaatatgtaaaccagttcatttctttagttgtagagagactttttttctttgcataataatagcaggtaatatttagtgcttactatatgccaagtgtgaattgacccatagaattctcataatagggcgtgaagcaggtatccttttttgccttgattttagggaacagagaactatggaacagagaggtaagtaaaaccattagaaagtgccagagctgggacccaaactcaggcctttgaactgtgcttttaacctctatgctcagtggtgtactggtgtaaaacagttttctgggaaatacattttaaaagcccaagttccatttgtgtaaatactcccatcatggccaatttcaagctgcccatggtttaatagccagcttggaaaattcctgaatatttactgatcagtgattaagagccagcttgccctaggacacctttgacgatcctacatggcctctctgcgcctgtggacagtatcatctgaagaaagaatattcaattattattttaaaattgactattgagttaatatttacttacaatgaaatatattcgttttaaatgtgcagtttgaagagccttgctaaatggacccatcaccacagtcaagatacggaacacttccatcggtcccaaaggttctcaggtgccccttccaggttaaccagttaattctcactcctcccacacctttcagctcaggtgaccactgagcttatttctgtcactatagatgagattttatctttctgaaagtttcatataaatggaatcatacagtatgtattcttttgtgtctggtttctttagctcagcacaatcttggattcagttccaagatttaagaaacatttactaccccataaaaaaatcatttactcagctatatgattaagaatttcattttcatttgatatttgagtatgtttttaaagcctgagtagttattgattggctggttttcttaactctaaataattgctaactttctttttcactttatgccttgtagaactgcctccttactggtgaactttttggaaactaattattagttaaataagacaattttaatttgctaagttgatcgttgtaaaaggtttgctttttttcttctttcttgttttaaaagataaaccttctagtatcaatacatctcaagtggcttgaacacacaggcttagcttatttttattttattttattttattttttgagacggaatcttgctctgttgcccaggctggagtgcagtggtgtgatcttggctcactgcaacctccgcctcctgggttcaagctattctcctgcctcagcctccctagtagctgggactacaggcgcacgccaccactcctggctaatttttgtatttttagtagagatagggtttcgccatgttagccaggctggtctcgaactcctgacctcaagtgacccacctgccttggcctcccaaagtgctgggattacaggcatgagccaccgcgcccagccaggttagtttattttaaagttcatttcttgagactccagaagatggcactcttacaaagcctaaagaaataaagctttggctttgtttttctacgtggttgtttttctaggtggttccttcctgctgtgacccatttgcaaagccatttgtttgggagaataacatttatttttttttctgattatcagagtcatatatgctgtttgttaaacattttaataaaggtattcttcaaaccccttgctaatccccaagagataactactataacagttcagtatatatacagtattttccagaccttccactagcttttacacacaacatatgcatatcaaagtaaaaatttaaatttgtaaaattttagattttaggataatcataaacaatgtacttgtcttttgctataggattctttattcagtttttttttcttaggagttcttttctttaaagacagaccttccacttctgcaattcattacttgccgagtccaaagggacctctcacatctgtgttgaattagggcttgtggcctagtgaatgagggatagactctcatgataaggatgctgctatggtctgaaagtttttgtccccccatatttgtatgttgagacctaatcaccaatgacccagtattaggaggtggggttttcgagagtggattaggtcatgagggtggagccctggcgaaggggattattgtccttataaatgaggccctggggcattgctttgtcccttctgccatgtgaggatatatcgagaagctgtgtatgatccagaaagcgggtccttatcagacagtgaagctgcctccagaactgtgagaaataagtttctctcatttttaagccacgcggtccgaggtattttgttctagccgcccgaagggactgatagatgctgtgctagttgcatttcttgtcagtgagaacagggcaaagtgaagttacataataagaaatgtaatgcttcctttgccaagtgaagacttataggatattttggccaagatagtatcagaaaaggactattatttgggtcttgctggctgtgccatgaaatcctagccattggaacttcaatgggaaattttgtgaaatcacgaatttttttcagatagttttttcccccacgatataaccctgccggtagctgacttccccaagagcatatagtccaggagaccaaggaagaactgaaaggcctttgtgatctatctttggaggtcatatactgtcacttcttcaataaatctgctcctcgttcattgtgagaaggaactacacaagggaatgaagaccaggaggcagggatcactggcaccaacctggaggctgccacaagtcaccaatatgtgggtgctatttaaaaccatgggattggctgggtgcggtggctcacacctgtaatcccagcactttgggaggccgaggcgggcagatcatgaggtcaagagatggagaccatcctggccaacatggcaaaaccctgtctctaccaaaattacaaaaattagctgggcgtggtggtgtatgcctatagccccagctactcaggaggctgaggcagaagaatcgcttgaacctgggaggtggaggttgcagtgagccaagattacaccattgtactccagcctgggcaacagagcgagactccctctcaaacaaacaaacaaaacccatgggataagatcagggaggagaggctggggagggatcagatgaggttacctggggagggagtatagagaaaagacaagaggattgagccaacattcagtcacagaagtctgagaaaaagctgcctacagagtgatggctctgggagctttgtggtaaaaaatttccaagagaagggaatgctgagaaactatggtactagctaataaatgacccttgcatttatacttgtgcaaaatcctttcccctttgagtctcacaccattcttatgtagttgtaaggaaaacagatgttatttaaagcagtaactatttgcagacacttttgagcaccagggaagtagaatcctttatttattacttgggggctgtggaccttgttcagaggccttgataaaatccttttgagtctgaaaggtaaaggttaccctaggatgtgtgctggaaggtgaaggctagacaaagagagctgagcgtataataaagtgagatgagtggaggatctgaaaccattaaaaatatttttttcttttcttttttttgagacagggtcttactctgttgcccaggctggagtgcagtggcacgataacagctcactgcattcttgaccttcccaggctcaggtaatccttccacctcagcctcccaagtagctgggactacaggtgtgcacccccacacccgactaatttttttttattttttaaattttttttgtagagacagagttttaccatgttgtccaggctggtcttgaattcctgggcccaagcaatctgcccatattggcctcccaaagtgctgggattacagacgtgagccactgcatctggccatataaatgatattaaaaggaaaagctgcatactgaagcaaatcagcttaagttggctgactagccattggcctttggactcagctctggaattcctcttgtctaacacaactcctccctctcccttctgcttctttgacactccttattcaccatgtctccttgtttcttcatcccactttggtttcatacagtaaataataataagacacaaatattgagtactttctaggtgccaatagtttccaggttcctagtgctttaggtacacgacctcatttcatcttcacaaaacccgtgccatgaagcaggtgcagtcattgctatcatttccactttaagaaactgaggaacacagaggttaaattacttgttattaagtagcagagccggaaattgaacccagtgtgatgttagaggccaggctcttaatcattgaattttgcccattttccttttagggttttgaatttggcaacccatgttgaaccaccatctactcaggctgagactttggctgcctttttccctaatgcagaacatgatttttgttactgacttgtgggtctgacctgccccagtggggaccccaccctgggcctcactgctgccagctaggagaaaggagagcagaaccatgtttgttcacaccctctgtcttttcacatgtatttgccctgttgcctttctccctcgtctacctggatgatttctttatgtagcatttcattgcccctcctggaaaattgttcacttcttccatgtgtccttcgaagttctgtttgttttcttttttttgctttttttttttttgagacagagtctcactctattgccatgctggagtgcagtggtgcaatcttggctcactgcaaccttcgcctcccgggttcaagtgattcgcctgcctcagcctcctgagtagctgggattacagccacctgcaactgcacccggctaatttttgtatttttagttaagatggggtttcaccatgttggccaggatggtcttgatctcttgagctcatgatctgcccgcctcagcctcccaaagtgctgggattacgggcgtgagccatggtgcccagccctttgaacttctattcaacagatctcactgtatcaacattcttggtaggtgtttatctctgccctcaaccatgagctcctcaaggcaaggaccatatcatattcatcactgagcctccaacctggcacactgtaggggctcagcgtttcttgactgcatgaatgatggtgctagaaaatgaacaggacaactctcaactgctgtagtagacaatataattttgctacaaccttgatgagcttacataaaaaggccagaacttctaaaagaatcttcttttagcttaatcctcaaaccctgacatcttcatcccagttttatctacattatcattattatcattattaatgttgtgtagagatgggggtctctctatgttgtccaggctggtcttgaactccgggcctcaagcaatcatcttgcctctcagcctcccaaagtgctgggattataggtgtgagtcattactcccagcctctattttattagtagtatttcaaaaacttctctctatgctcttgacattcttgttggaatcaaggcatacatttcacattattaccattcatcttttattacaattaactctattaaaacaatactacttgattaaagctctatgattaaaaaatattccgggttaccagaagaaagttcgttaaaagactactccaggtccagaaggatataaggtaattttgatttgttacaaagaccaacatgaccaaaatgacttgtgactgaatattgtttcagaagggcaaaaaggattcaatgtgaatagggaatccaaagaaaatggaacagacaaaaatagggattgaagtaatacagcatgttactctgaaaggaataatttctacttgtaaatttcttgttcctaaggaaccaatcatggggcagatcttgtgaaattttacattagttcttcaatttcctgaacttgagatgagaccacctcaccattcaccatctcctgcacaactgtcttgatttttcgggttttggttgggtctaaagataaaaatggaataagggggcaagagttagtgtttcaaatattaatccaacactggttgtttaatgtaggcttctaaattaagcattggttgatacaatccatctaattaaactttcaaaagtaaattttacttctcaaaaatgtgttttagccaatgacaatgaaatgtattcagtgttgccttgtacatatatgaaaactttttttaagaaaacatttcaaaggtggttatggtgatcataataccttgcagcagagtaggttttttcccttctgctttgccattttttttattttttaattttaattttaattttcttaaagacagggtctggctctgttgcccaggtaggaatgcagtggcatgatcatagctcactataacctctaactcccgggctcaagcggtcctcctgcctcagcctccagagtagccgagatcacaggtatacaccaccacacccagctattttttttcttaagttttttgtagagatggggtctcgctatttgcccaggtgggtcacgaactcctggcctcaagcgatcctcccacctcaggttcccgaagctatgaggttacaggcatgagccaccatgcccaggcccccaaaagttttaatatggtatagactactcattttgtgcaggaatgcataaatgtttttccttggctcagaatataaatatgctttaaattaaaattaataataatgcagtagtcaatgaggtcttacaggttttgcattaataaatgtgattccgacttattctaagtgattctagggtttctgcatacctttagaggaatcagttgactgtgcttgtgatttggagtctgtcacaaataaactttcctccaaaccatcactgtaagaaaacaaaggagatgacctcaaaaagtgaaacaacctggcttttaatggaagatctggtctgagaaattagatttcccaatttgtaggcctgagttcttccaactagtgcagactctgatcacttttggaaagcttgttagagtaggtggttcaggtggctactatgtgtccttcttatcatcaggtctttgatatcagaaattgagtaagtgacttttatagtacagggagtactcatttacaaactgtttctgaccgtggtgcctttgttctttgcagcattttatgaattatcaagtaagataatgggtgaaaacactttgcaaagtgtagagcatttagtaaatcccaggcatatctttactagacttgtgtttgtttgtttgcttttctgtcaactaaaaccccattccttctatttctgctgcccactcttggtcagcccctgaaggtgtttacagcctccgttgtctgctcacccttgggcctccccgtccagcaggcggcggtaggtctcaatctccagctccaggcgggccttgacattcagcagccgctggtggtccacgttctggcgctctgcgtccgcgcgcacctggagcagctgtgcctccaggttgctgatgagctgctgcacctgggacagctgcgcgcagtaatcgccctcggcttcggccaaggagtcctccagggatttcttctgcacgtgggagggaaatggcatagaaataacgatggaggggaccgaaaagaggagggtagccaacggctaatgtaatttggatgcagcattttctttggaagtccaaaggatgctacgtctgtttgcgcacgagcctaccatggcgagctgggactgtagctcgatctccaggttctgaaaggcgcgacgcaggtcggtgacctcgctcttgctggactgaagctgctcggtgttggtgctaatctccttacggagctccccgctctgcaacagcaaagacagccagggggctcgagcgctgagctcgttcgcaggcctttctgtgaatgtatcaaagcctttgttgtttgtgttaccttttcaatgaaccaggcttcagcgtccttccgattctgctcagcgatggtttcatactgcgcccgcatatcattgaggagcctggtgaggtccactccgggggcagcgtccatttctacgctgacctcgcctgggccgcccacccggaagctttggagctcctggggacagcatgtgagagagaggggcacaggggtccattgtgactttcgtgggccctggatacttttgtcctcttgggccccttcctacacacacacacacacacacacacacacacacacacacttaaaaattctatcttatgactgttggtataaagacaaatatattaatgtaatacattaaaacttttttaacctcaaaattcatatttttcttctgatattacaagaacttaagacatattcatgggtccctgaaattaccacagaccctgggagcagtgcctgctgtgcctaatgggtaagttggctctgcttcttgagggaccacgaccttcacgtgaaaggaggcctggcgtacactcactggggttttcacctacagctgccaaaccgagggctgcagacagtacctgggcttgcacgctgtttgtgccacaatcatcgaaaatctagtagaaacttcctattgccagcatcccttccctacctagcctccaatatgcaccatggcacctcagagttttctggtgtgcattatgctaagtataaccagtttctctgacatataaaacattatatattattggtagacttttgttttaacttttaaaatactcagtctttttaaaatcactgaattaggactgttagcattcctattgtcattgccttataatgaaaatgacaaaatcagaaagtgcctcaaatttgttgagccttagcaggaaccaccatcactactaccaacacacacacatcacacacacacataccacacacatcacacagaaatctaaaacaaatggccattttaacagggagacaatgtattctccatacttgtcctgactccagatttctaaatttgaaattgtaatttttgggtctgggagaaaaaaaaaagtagctgagtgaggctgccctgtctgactcacatcctcgtggttcttcttcatgtaggccagctcctcgttcaggctctcgatctgcatctccaggtcggtcctggtcagggtcagctcgtccagcacccggcgcaggccattgatgtcggcctctacgccctggcgcagggccagttcattctcatacctgaaaaccaagtgcaaagcagttgagggaatcaacacaaccatttgaacaaggccactgatcttcagggctatttcttgcttaaatctgtgcacctacttaataatggcagcattgtagtgtatgatgcagtttttgctgttgtgtttttcctttccttttttcccaccattgtttactgttcagttggggaggagaagaaaagtgaataaattataaggcaatactttcctaccagcgatgaatcccaataccacagcatcccagggaataattttccctttggctggctgccgtggctgtaaatagcagcagcccctctctaagtggaatttctaaaagccgttgaaaataagttactctttttgcttaacgttcttcatgatttaacttaaaacactgatacttctttagtggctttgactaagattttacaggttcagaaccatggccattgcaacttcctgtgtagaaattttgtgaagcaaaaaggaaattagtatttcttacctatatctgggagagttgagcatggaaaaggaggaaggaatataaaaattagtacatggttaatctttccattgtatgtgtcatcaggaaaacaatggttgatacattgaaaattgaggtttagaggcgggtggatcatgaggtcaggagtttgagaccagcctggccaagatagtgaaaccccgtctctactaaaaatacaataattagctgggcacggtggcagccgcctgtaatcccagctactcgggaggctgaggcaggagaatcacttgaacctgggaggcaggggttgcagtgagccgagatcgcgtcactgcactccagcctgggtgacagagcgagactccatctcaaaaacaaaaaacaaaaaacaaaaaaagaaaattgaggtttaggacactggtaggattatggtgtcagtcacatcatgagttgagtcaatagcacactacaaatatcgtgatccatagccctgggtttaagtaacttataatttaaggacatttaatctgaattgcattagattctaattactttctagaacaccctatgtgaatttaccaaaacagtaaatatatggagtatgtgaacttcagaagattttatatcaatgaaggcaggacagtaggacagaagacatggtgggacacgcccatgatcttcagtttattcgactcacttcatcctgaagtcctcagcagctagtctcgcattgtcaatctgcaagaggagctgggcatttccaatgctggctgaaatgatctggcaaaagagagggacacacacaagattgaagccctaaaagactagtattatacaaatatatttttgacacaaaggtgaaaatggtgatattaaatgctgttttatttagagtttaagacagtttcatttttctaagacaatatctgtataaaataatattgagaagtaaagaaatgcagatttcctacagaaagataatggaaatacaatcatttcttagtaaatgataaagtggagtgaaacaacctgggatgagaaaattgctgcaagtacagctaaattggaaaatatcaaagttgtaggtgattatcactgtaaaacattgtaatggtaaaaaggaaaaaaaaaattcccaaagcgcctccaaaagagatcttaccttattcctgaggtcttcaatcagtggataatatttgctgtaatcgctctgtgaagcatctgcagtcccagttcctcgtgtttcataccattctcgaattttattttctagctcagtattagcctcttctagagctcgcaccttatccaggtaggaagctaatctatcattaagattttgcatagtttctttttctgatccagaaagaaggcctccatcattgcccgagagaatacctagagagccacctcctgggctgcccccaaatcccatccccagccctccaaagctacctccacccagggctctcccataaccagcacccagtcctcctgccatggaacttccggagccacccccaaagccggaactagaaccaaacatggaagcagcagaaaagcctcccccacagctggctccaaagccaaaggcacttcccccataaccacttccaacactggaagcagacatgcccctgggtctgcctatcacactctgcgaggagagccgccgggacagtccgggggtgcgcactgagagtgacatggtgttgttggagagatccatggcctggggaaggtggccacaactggagaggaagttgtgccagcaagccagaaagctaaacttatataggctgcaagatgggtgtcgcagttgaaaagttcactttctccactcaaaattggatcctccccccaggtttttggccagctcaacaagtgaatgatttatgtataatgaaaattcattgatacagaaataatcgaataatcatttccattaaatatttgttatatgaaaaagaaagctgggtggagtagagtctgcttgtcataaggaatttttcttctccaaattagtctgttgcctgtattcccagcactgcctagcgtcttgttcacagtaggaagataatgagcgattgctgaatggatacgttaaatacttcttcctaaaccttatgcttttttaagttcttccctgatcttttctgtttgtttcctttggaaaatccagtgtaaaccatttgtttcctttggaaaaaccaatccaatgtaaaatccagtcatgatcaagtataccttttagtggaatacagcttcagaagcagctgtgaaatgcactggtgaaaggtggagaataaatatattttccagatggatactagaatttgcattttcaaggattttaaaaccttggctttaggatgttgcatgtttcttttccctcttattcttcaacttggaaaagtactatttttgagtacagttgtttatagtagagtttattatagttgttttagcagttttaccttgtctgattgctcactgctctacactcagcatttactatgtttattccttcaacagatattgcctgtaatggttgctcaataaatgtgttgactagttgaatggattgtgtaaacacttcagattttgttgccattatcaataaggagaaagtggaaacacagttcaaattaagaaatgattaaaaccccaagtttaagaggctagtgaaccatttcagttgactgctatgatgaaaaaggataaattttacaatatagaataaattaaatgttatattttaaactttgttgtgaaaactttgcaaagcgtgcttcaaggaattatatccagtatctttaatttttaagacataaagttcttatactttcttgtttggtatattatttatctttgaaattgatatggcttatatattgaacatgagaactaacgttcttacaggaaatgcattaacttgaaagaagcctgctttcagagagagttgtagatacctggaaaccgagtagtacaattccagggtggtggaattcccttaggaatttaaattgtgagcattttgattggataagaaggaataaggatttttcttttacatgttttctttgagatgatggcccaattctctacatgtctcattgcaaaatagttctatagtttttttttaaatatagctctctatgtatttatagtaggaaatttagaagatgcagaaaacataaagaagatgtatgtatatatgagtattttatatacatttttgaacataattgattcaatataagattttataatctgcttttctcttaagattatatacttatctatcacttgaactttaataattgggtacagaacatggattgtggattcttcgaaatcctttgttggattcagatttctaaattcagtttgctctgtatttgatgataggaaataaaatttctgggtgtaaataacagtttttttgcaaagatgtttatactgaattttattaataaggtatacactgactgtgtgtgctatagacatatatgtattttgactagaatggatttattgaaataaaatacattaaaatcattgtaatgatacatttcctacctcgtgggaaacagggccttcatttctccatcagggacctctgtttgcttatagatggccactaaaactccttttcaatttggtatatttggattctgcgttttattttattctaaggaaaagttttaaaaatatcacaagtattctagatttctaaaataaaattgaattcttatttgatttaataatacatacctttcataaaaaggaagatttttatttttatttatttaccactactggattttttttaaaaaatttcaactttaattttagattcaggaggtacatgtgcaggtttgttacgtgtgtatatttcatgatgctgaggtttggggtacgactcatctcatcacccaggtagtaagcatagtacccaatagttgtttaacctttgctccccacagtaattcccagtgtctattgttggcattctatatgtccatgagtgcccaatgtttaattcccaaaaaggaggctttctatacattttaaagtggagattgaatctatctggtaaagattaatttctcagcaaaattattggatacctgtgagatcattgagatgttacttacttaatacaaacaatcaaccataaaaattagcaaatatgtggctattgtttaaggtttttccataagcatatgcaatactttttgtttctcttactaaaacaataacctgatttttttggacacttcaatagcagagataatatgtgaagtaagcctgtaactgttacacaacttgaattatgtcaaaatgatgtggtctttttgaaaattaaatcaagaatttcaaccaagccaacatgaaagtattcaagtactaggtctgctgttacctccattcttcaatgtctagtccatttgcccagtgtcttggacaaagtcagcattcaatatatgcttattgatttctctcttgataaatcaagctgctgggccattaatgtgtgttatgtatgaggaaatttttccaaaatcaaaaaagagtgtatcaatataaaggcaagctacaaagtataataatttaagtattcgtggattcacaatgtagacacattcagatgttactctcattctaatgtacacatgcatgcacacacacacacccagaaacatgcactcagatgtctttgcttggtgccagtgtgcaggtgctccctgcagagggatcttctgcagcccctgctgctccaccttccctgggagccctttctcctgagaatgcttctttcgctggcctttatctcattggagttagtctcaatggttagcacttgttttgccttgtagagtacagactgactcctgaggaattccagacctgtagcctagattccccgtagtttactgctgcctcctgtccacctgcatatccagatattatctccctgattacagcctccccgaagctgaggttcttccattgtgaagagtcctgagccagaactagcagtgcccactggggattaggggacagatgccgaggggtcacacctgaagcccatggcaaacctccataaggaatacctgggatcaattctggcaaatggaaggactgttttgactttttattaaaaaaaaaaaaaaaagccactttcccagggacacaaatgatgaacccgtggtgaaatccaattacaacttccttttatattattacataagggacaaatgtgaagggacatatttctccccaacctaaactcgtcacaaagagcaagcaagtgggatttctaaataaagggggtttaagcaagagatttgcagaaatcacacatttgctatagatgtggaaagaatgtagcaacctaaggcagtctcagcttgagagaagccatgatccatttgtttaatttcttgagagaatgaaaatctggtcagtggaaatgccagtgattttagccccatatggaggtttttaccaaggattccttaaatctatattataagcattttgactgagctggtcttgtttgaattatcagttattatgtacttactactttttggacactgggccagctgaattacagacattattttttaaccttcacggcaagctcttaaagtggtactggttttatttgtttgtttgtttgaaacaaggtcttgcttggttgccctcactccggctggagtgcagtggtgtgatcatagctctctgaaaccttgaactcctgagcttaagcaatcctcctgcctcagcctcccaagtagctaggactacaggtgggcaccacaacactggctatttttttttttttaatttttttgtagagatggagtcttgttatatcgcgtaagctggtcttgaactttaggcctcaagtgatccttctgccttggcctcccaaagcactgggattacgggcatgagccacctcaaggcgcccagcttcaggtggtacttttatcctattttacagatgagcaatctgagagtccagatgttaagtgatttatttacgcccatgcagctgggaggaggcagagataggattcgggcctgcagtgccttctatagataccacaaccttgctgctggcggtgacaataaaaagggcagaggatactctgacatcccctagctatgacacctgacactaggcttctgccctgcacatctaacaggaggtgctcttttttttttcttttcttttaagctttctccttgaatttctcagtgtatgggctgagacctagagaatgacttttcatggcttataagcaacaacatgacacatgaaattctgtaaacacacaggcaaatgcggttttcattttagctttgacctgtaactacatctccagagatcttataaagcacaagttaaacttgcactccccacacaagaacttgatgttatggttgttaactattattcactcccaagtgtcccccaagacagagagattccattttactgccatagaaatgaaaacagaagcaaataaaatgtcaaaagaaatgtgccaagttcaaaattgtacctcagtgatttgatcacataatacgggaatatgattaagttgaatttttgaacttggaattgattttgtgctgaaaggtacactttccaactctaatgcctatggtaaaatttaaataatattgctcaatctctaaaaattatgtttatatattatttgtttatgtttctatacatataacatattatcctagactaagcttgttaggtaggtactacatctaatttattttttatcctgagtcctagcctagtgtttcgctgaactttatcactgcactccttgaatgatttcatttgaaagaagttaagtcttaatgtgtttgaatgtgtcatttgaaattcatttcatttgaaaatgactgtgccctaatttactggtatgctttgaccaatatttattctgaattcagttatgaatggggagcaacttcagaagttgaaaagggaaatatttcttcttcagtggcttttttttttttaagtgggaggctaagttaaataatcaagactctgctttagaggttttagaagtgaaaataattttctttgacagccacattaatgtataaggcagtggtgatgtaaaaaacaataaacaatcttgggcttgttggcagagtgattgcataagttgaggcagagaggaaaatgattatagccagggcaaactgttcaaaagaattatatcttccatttttgtagagtttaggaaatgttcaaaatagagaaaattagttatgtggtttttacaagtctttagatttttattgagtaaatcataccctcatcttttcatgtcaggttggtttctgtcctggtctttgcagggttttctacctgagttttttcccgtaagacagacctgtcattttctgcaactcgctgatcccttgatctgtaacatctttcactttggataacattataaaatcctgtgagtgactgagagaattttgggttgcctacattttatgtattgtgcttttgagatgagggttaaacaaggaccctaaggggtatgagtgagattgacttctgggctccagagatcaatggttcttgaaagcaggggagaattttgaaagtggtaggagacaggaagatgataaaataataccctgatgagaggaatcttggaaatgagcctaggggagagaaaacagagatgtttgaaagagaattcaaaaataaaaatcactactaatgctttaagttggaattgttacttgggggtctaatcaggtacctgaggctgatcctgatgcatgtggatgagaacagagtgtctgaggaggtcactggccatgttttgattttgtatcactccatgtcattctcctttttagatgattcagaactctgggtagaaataatctccagagctcagaaaaaatagttatttccatcctaacctcacctctaggggctctctctgagtttgatagcttcacttctgcactgacaatttcatataaaatgaaaaaatacattgatgataattctaatgtgtgataaagacttctctctggatctgtttacctgtcagaaataggattatgtcattctagttcttagctcatatcagaaatatagatagatacaaagattaatgcttcactttcacacagtaactgctggcagaactggaggtagaactccaccatctggtccacatgtatgtagctctcactcacttctttgaaagattgcttggaagaaactagagacagaccaaagaagcaagaggaagaaaaaatcttcatttttctgatctaaaaataacaattctacttcttttaacaggtagttaaaagaggaccatcctaaattaagaataacaatcctacctcttttaacacagtgtcatcattgccatataacagtggtcaggcctaatcagttacaaacccatctgcataggtttcttattaatcagattcacagtctggtatttgcatgtcaaagtttcagactattctggaatgtgtctcagtaggtgaaaaagaattcacttttaaatattcttaacatctttaaatgcaacttactagctagcgtgacttggaagaaaattaagaaaaaaatgagtgaaatcttttcactttggaaaagaaggcaatgagaataggtgagaataccttttctgacaaaagttgtactgaatcaagtcatgtgtgatgttagccagcaaagctggacatttgccacaattggctgttgtgtctggctgatgaaaatgacaattagaaaacaacaaaataactgcggataggcaagtgcctatttcaactgtgaatcatgtattgctttgttatgtaattagttgcttatgagggtgtcctggttttagagaaacagcgctgaggttcagtctcgctctactacttggtaactgcttgactttgggaaagtctttatctcatgtcttcatatgagtcctcatttatcctcatatgtaaagtgggggtaacataataaggttgaaccttattatatatgctatataatagcatataaaattgctatttctgaaagtcagaaattatcatatattggaaagctttaaaaaaatctttattctttcaatttaaaataatgaatcaagtgcctgctatgtgttagatattatattacatcttaggaattcaaagtggtaccattcacatcctcaaaaattcccaactcttagaaattatcatatattggcaagttcatatgattcaacctaatagcttctacctcacaggattattgtgagaattaaatgagaaatgcatgaaatgtttggcacacaggctcatagtaagtgctcaataaatggtggatattattattcttaaatgaatcatgtaattattttctatataataatcaaactcaatcccacttatttgcaacttctgtatcaagttttaagtccaatctatttactggaatacaatgatttagcacacattgatttttcccataaacattcatatgcaatgattgctcactaaaatgcaaaaagggtgaggatacaatatgtgtttttattgtttttggatttggcttctttcacttagcatgttttcgaagttcatctctgttatagcatgtatcagtacttcattcctttttattgacgaataagattctattgtgtggatatattacattttgtttatccattcatcggttgatggacacttgaggtgtttcgctttggggcttttatgagtaatgctgctatgaacatttgtgtataaaaggacacatcgtattaacctatttatatgaaatgtccagagtaggcaaatccgtagagacaggaagtagattagtggttgttaggggctgggaggaagggaaaaggcggtgactactaataggtacaagatttccttttggggtgatgaagtgttctaaaactagatagtggtgatggttgcaaaacattgtaagcatactgaagaccactgaattgtacgttttgtaagggtgaatttcatggtgtgtgaattatatctcaataaatctgttattaaaaaaatgagagacatttcattaaaaatatatgttcaccatataaagaaagagaggacctgatagtatatgcagcttattatcaaaaggagacacattttgccttgagaagggtttcagtaatgttgtttttaatctatttccattttaagtatagtgtacttcactcttattctgctcagcatttgtgattgaatttgactctcaaattattcaaaaagctgtgttgagttttaaaaggcagtggaagcaatgggaaaaagcagatatagctcaaaggttgtagagttgtactgatgctgaaaaatcaataagattaacccagaaattggctcaataagaaaccagggactcccaaagggggttttacaattcagaaacaggaaaaaattagaaagtggtttatttgcaatttacatggattcctctactttgtgaggtttagtataattgaaatgtattgcaattttcaggaacattacctacaaattgatattaggtggtctacagcttgtaattgatgtgcttcatgataaagatggcagtaatgatgttttaaatattctagtgctcactggatttcatttttgcaggcaatttgcagctcctctgagtaaaacatttatattcaattacagagtctgataaataggattcccgccaccccaccccttctaatcactgcagagtattaatagtgctttcttatggctgatttcttgcagggagcaaagataagattatagccaaatttctttcaaaacctcagcagcatctccttctggtagctatttagatattttcttccacctctttgacttcagatgacacgaccttgccatccactacttcttgcacgactgtcttaatcttcctggttttctttatatctgaattcatattaaacattaaatgttaattcaggcacatgactctgctgatttataatattcaactttaaattattattctttttacttatttccttcttttagaaaaatatgttaaacccatcctctttctcaaaaaatcttaagtccattttataaatagatgcagaaaatgtgcttctccccaaatttacaaatgtcctactcttaaaaattcaagaaataaattatcttgaatttaagtggaattcaaattttgtcttgtttttccttttcaggatgtcaggatgtttcaagatagcaatagcacaggccaagaaaatcaccccattctgaggagtgtgcccaagttcccatgtggagggtttctttatgccatgtacaagatttttagaatccctggtgtcatatctgctcccttgagaattggcctttgctatggtttgaatgtgttccctggagttcatgtgtggaaaacttaatccccaatgtaacagtgttgggaggtgcggcctagtaaaaggtgattagatgatgagggctcttctctcatggatggattaatgtggttaccatgataatgggttagttattgtgagagtgggctagttctaaaagaaagattagcctcctcttgctctctggttctcatggacactcttttgcacttctactttctgccatgggatgacacagcaagaaggcccttacaagatgccggcaccttgatattggactttctggcctccagaactgtgagccaagtaaacgtctattgtttgtaaattatccagtctcaggtattctgtcacagcagcagaaaacagactaaaacagcctcactttactttttatcagtggcatgtagttaatagaaagcagctgaatgtcatagaaaatgtgcaaaaatttagaacttacctctctcttccagggtgcttaactgatattctgtagttctgtttttttttttaatgaaaagaagaaaaaagaaacagaaaaaagcattattgctgttttgaaaatggaatgcactcctgtcttttatatttcaaagtccaagtgaatgtgttattgctttcatatatctttcccttttacattgcttttattgcaaacttgagcattttactttttaacttgaaaaatacatagatttaaaactgaccagtttaatatatgctaagaagttcctctaattaaaataacaaaattacaatggaagtttaaatcttgtgttctcttgttgatattcttaggtatggtatctgaagacagttgctgctgccacacttatgattctcagactggctcccgtggacctcagcagcttattgtctaattcatgagctctcaattagaatttccaaaaggttattatgccttcaattatatattaatgatgaaaattaatatcagcataatctatatcatttggagaattatctccaaatgatcatgtggtagaactcagtcctaccacatgatctcaaggctgtacttgatattttgggcgtgtgtgtattttttggtatattttcgttttgttgttcgtggtgaggcatgtgtgagtataattgcttctgtcctagggattgcattggtgctgggtaatgagtgacagggacattaaaatagaagtgcatacagatattgacacctattccttgattctaagagccttactttacgtcttctccttccagaaggcggcggtaagtagcaatttcctgttcaagtcgagtctttatgtcaagaaggatatggtattcgttgttctggcgttccatgttactccgaatctgcatcagttgggcctccagagagctcaacagcgactggaggttggctaactggctgctgtaacgggccttggtctcctctagagtgtgctccaaagactctttctatgagcacaagaaaaatagggcacttcttatgtgaggacttgattcaagagatgggttaattttaatttcctttgagaagggtctctgcagttcatcactgtgggcatggtgtatatttctagctccatctcccactcttcccaactaggcaacctcagccagccagctaggatcattagctcttggggtttttctttgcttgtagctttgcacctactgttctttcagtgcggcgcattgtagcattgttctcagtacttgcttccccactgtgtgaagatgttatacctctcactccttcatcagacctggccatgtgatctgtggcatttctcaattgcaggattagattcctttaatccattgacacctggctgggtcatgtgactctctttggttaataaaatgcaggtcaaactgacaaatgccttttctttttctttttttttttgggacggagtcttgctctgtcgcccaggctggagtgcagtaatgtgatcgcagctcactgcaacctctgcctcctgggttcaagcgattctcctgcctcaacctcccaagtagctgggattacaggcacacaccaccatgcccagcttatttttgtatctttagtagagatggggtttcaccatattggccagctggtctcaacctcctgacctcaaatgatcctcctgccttggcctcccaaaggacaaatgccttttctaaggagaagctttaagagctatcaagtggaccaaccattgctcttttctttctgccaggacactggcatgtcctaggtagggcctacccctttagccttgcccttggaaaggaaatgtcacggtggatgtagtatcatggctgcaggccactgtggtttgagggattctgcttaccacaacataatttgtcatgggcttgctgatttgcttggcctggaatgtctctagtccattctccatcttaaaattttatcttagattttgagatctggtataatggacacatacaggggaatagcagacatgggggcctaacagagggtggagggtaggaggagggagaggatcaggaaaaataaccaatgggtattaggtttaatacctgagtgatgaaataacctgtacaacaaatccccatgacacaagtttaactacatcataaatctgcacatgtactcctgaacttaaaagttacaagaagatctggtttaaatgccactttccctgtgaaatcttccagatttactctttcctctgcattcatgcagtacattgccctttcctcgatttctctctgtcctttaattataatcagttgttcggcctgtttccctgccagttctgcaaggggaagggttatttcttgtaggtctttgcatttctatagttcctaacagaggaccttggtaaacacatactagattgagaaagagaagttagatatgctttaccatgctgagatgggactggagttctatctcaaggctctgggaggtgcgtctcagctccgttagttgaacctcagttccttttaattcttcagtattcactgtgacctgttgctgcagaactgcagtctacagtgccaagagtgaaaaaaaaatagttgaggggtggaaataagaaagaaaagacagaaagagaaaggaagaatgaacaaatgaaaaagaaaatgagttatctgtttctggaggaaagcatctacacgtttgctcaccctttagaattgtgtggttacctgtctctcaaactgttctttggcctcttgaaggttcttctgggccatgacttcatacttctgcctcatttcattcatgatgacgccaaggttcaggcctggagcagcatcaacctccacattgacagtgttgcccagatgcttgtgtaggccatcgacttcctatgaaagtgaaatttctgattgattttagtctgaagcacattctcagataaggctgggcagaaaagacataaggagtctcatgacctctttcattgggaataagtaaaaaagatataaaataataacttgtgttgggcttattgtggtccaggtgctgctctaagtcatttaacttacaacaacattatgaaaagaaggtagggcttgtatcattattgtcatcgtcatcatctctgtcactatcaccaccaactcttcccccttctcctgtttctcccgctcctcctattattagtattatatagaaccattccattgtttccaataccacttctgaatattttctcacctcctgatgctcctttttgaggagagctaggtctttattcagttcttcaatttgaatctccaaatctgttttatgtagggttaggtcatcaaagaccttattcaggccttggagatcagcttccactgttagacgtattcctctctcagtctcatacctgtgaattaattagtgtacagagataactggtccttctgaagccattataaggagagaatctaatataatgggataggtttttaaatgtggcttatgaggagatcaatttcaatactttataatgtctgcctttacacaatcatgaaatttacataagaacctaggagtcagaaaatgtgctcaataatataatctctataatttggggtgactggtaaaaaggcaatctgaaataattttgaacacttctaaattctagaatttatcttataagaaattaaattgtgttaattattgtgttggcaaagggttcttattattgatattaaataatggttagttttacttaatgaatgtacatgatcgatttatttttattactttgtgaacagagacatccaaagtgaattatctcaaacagctctacatcctcctctacaatcttacatacacactgtgtgtgtgtgtgtgtgtgtgtgtgtgtgtgtgtatttgagacagggtcccactctgtcactcaggctggagtacaatggtgtgatcatggctcactgcagcctcaacctttggggctcaagcaatcctctcacctcagcctcccaagtagctgggacagcagatgtatgccaccatgcccagctaattttttttgtatttttgtatagagatgtggttttgccacgttgcccaagctgttctcaaactccaggactcaagtgagcctcctgcctcagcctctcaaagtgctgggattacaggcgttagccatcatgcatgccctgcccagtttcctaaaatatccaactttaaaaaatgacactgcaatgtgacactcagtgctaggtaaaattggaagtaatgcacctttactgctttcatctttggatttgatttcctatttccttcttgttaatcccttggagcattaaaaggctacccttctaaccacaaagggctttttggtgttaatgcattgtacaaattcaggatgaagaggccttagtgtggaagctgtttgcaaggaacaggtctggtcacatgtggtgtgatgactacaaagaaagtgaacacaatttttactttctttttcttttctttctttcttcctttttttttttgagacaaggtctcagtctgttgcccaggttgcagtgcaatggcacgatctcagctcactgaaacctccgcctcccaggttcaagcgattctcctgcctcagcctccggagtagctgggattacagacatacggcatcacgcccagctaattattatagattggtcctggttctttggttggccagaccatcctgtaaaacactggcaagccagaaatcatcaagagtcacccctggaacttgggtcatacacttgcaggcacttgaatgaacgtggagaattacttggagaatcaccaagggtagacacaagactctctttagataacagaaaggcacttagggagaaggagaattgtaaattactttgttattactccaaagggcagaattaggtttagataccaggttactaaaaaaaaatttagcaaccagtaataaccaaggagaatagtagttactggaggtgtttagttacatgccgggggatcaagaaagagaaggccatccctgagtgctgggttagcttcatacatgtagcttctaacctcctttaggcttcaggattctggacattgaaccgtgcttcctttatcaacaatgatatggaaagctgagtatctggaaggactactaaaggaattctttttcagaaacttttgccacgtattagggaacctacttcagtctgaagtcctcagcagccagtttagcattatcaatttgcaggacacaccgagcattttgcagttgagcatccttaatctggaaaatacatgagaaagaatgacattttcttttttatttatttatttatttatttatttatttatttattgagacagaatcttgctctgttgcccagactggagtgcaatggtacgatctcggctcactgtaacctctgcctcccaggttcaagcaattatcctgcctcagcctcccgagtagctggggttacaggcatccgccaccatgcccggctaatttttgcatttttagtagagacagcattttgccatgttggccaggctggtcttgaagttctgacctcaggtgatctgcctgcctcggcctcccaaagtgctgggattacaggcgtgagccaccgtgcccggccaagaatgacattttcaactggataggagtttacaaggatttagtttatccccagctacagtgactattatgtcaaaaatgatgttcatttcaagtatttctacatgaaaatatatagaaaaaataatgacatagttatttaacataacagagtcataaaatgcaactctagatgccccagggtttggtctactttcttgtgattttacagaaggataatttaactcaacttgagtcatcacaccttattgagtgccttgcctttgatgtttctacttaggacatttcttttagcccctgtggtctggtgaactcccattcctccctcatgtctcaggttcgacaacattgcttcataggagccttcacagatgctctcaaaactgaactggatgatctgcctgtgctctcattatccctctgtgtgctggtccctctgtccatccctgtatcctcataaatcatattgtgtccaccataatattcctcagtccccagcatggtgcccagcacctagttagtgttcattcagtattggctgaatgaaagaacatgatgcatgaaagaacgaaatgcatgatggaggcatatagatgaaaaatctacttgcagaagatgttacaatgacatttctctttcaatggacccagttttggagagggctgcttcctatggttgggactgtccagctcaatgggacggatggcctgtgcctgtgtatttcagatgaaccaaactagagtcagaaacacgagacaggtgtggttcgaacatttttagtgagagcttgcgaaggatgaactttattccggaagggctatttaaatgccattgcttcacatgcccatagtttctaaaattccaaagtaacttcccatggagtccgaatcaaattgccctgatgtttagtacaactcaagaaaaacagacttgctggtaagtaaatgcgctttgctctaaaggagtatgaatcttaacacaaattacagtgaacacttttcttaattagataagaactttaatttgaagcaagtgctctgtgtcatatctgaaattttcaattaggagcaaagtcttctgcttttattccatgaaactgataaaatacagagctccaccctttttttgatgacataggaggaggttgtgatatgattgtaataaacatgaattgggggcaatagaacattttattactgtagaagtagtttctgaactgcttgatgctgatggtcatgttattaaacagggcacttaaaaatccaggcatcattaagacccatattcctgccacactgtttccacccagaatcactttgctatttaaatctgcagtacagtattctaatagtcatattataacatttacttaaataaaaggagaaaagtctttgaatttactggggtttcaaaacttgataaggactaggtgaaaaactaagagagatttatcacgtaattaatttttagctcttttcagaaagattgttcactatacatttagccctgatgtgataagctgtgacaaagattcattttattccggaggataaaatgttcatattttgtatgtaattgtgttaaacattaaaaatagcatgatttaaggtcatcctgttgtacagtcaggtactccagcactaaaggtagatgaaagaatttttatagatgtaacattttagcctaatttgctttacaaagtccatttggacctacctaacatagataacctcttgatttatcttgaagctaaacacagagtaggaaacacaagcatcatctctcacctgacttcgcagctcttcaatttgtctgtaatatgcactgtagtcgcgaccagccctcggggcgttggtttcgtaccactgcttgatttgcacttcaagtttggagttggactgctccagggtccgcaccttttctaggtagctcgctagacggtcatttaggttctgcatggccattttctcattgccaacaaacaggtccccgccgcctgtgagatcgctcccatagttcaccgtgtgtctggagttggagatgcggatgccccggcctccagcacccccataaacgctgggtgtcgtcccgaggcgctgcatgcccactgtactgactacaggggcctgcaaggaggagctcaggcttctgtggaagcttctgcgactgaaatccattggagattccaggagggagcacctgtagcttcaggatggttggggcagagtgtgtctcatggagggtgttgagctagccttttatgaagtccacaggcaagaaactcctcctctgctgacatgtcactaggattggcaccacagtccaccttgccttacttccacgccccccgctttgtatagcaatatgttaatatgcttaattcaattccagaaaataccactagaggcatttcttggaggcttttatcaggggcaacttttttttttttttaattaaacaggtaataaaaggaaacaggaaagtgtattcttttagcccatgcgcctgccttggcaggtttttttcatcctaacatacacacaaagaatatttacaatcctcatgtataatttaggtatctaaaaaggcagatgtgcctacataactgaaagtcacaatggagataaaggacaatgtttgatttgtattgaggagttgctcttcagaacctctgtttcatgctttgcttgtgtttggcttttaagtttattgtgttttggacatcttattttataagactattaaaatattttgtacaaacacaaaacctcgaatccctaaaccaggaatgaaaccattgtacatttggagatgtagtttggggatgtgaattaaatgaatttagctgagtgatggattagatgatttgggaggttattttctttctatttctaatgttctatgactaaatattgcattttaggtttccagtcaccacctggcttcaagtcctgttaccaagacacttagaataaatcacacagtgctttgtacctggcatggtatcaggatgggtctcctcttttgtatgaggccagcttaacacccaccatgagacagactctgccccatccatcctgaagctacttacaggtgctccttctaaagtccccagtggatttcagttgcagaagcttccatggaagcctgatcttccttgtatgcccccataatcacagcgagagtggctgtttatataggaaggggtgcaggcggggacttgggactacactcagcttccagggttgggctggaggcagctgcttgtgtgtggacctctagacacatgggcatgatctcatcggtgggaatctgattgtaagcaaccaataaatgcctgagtcacttgcttcccttcattcaaaccccctggctgagaattcacacttcccatgaagcatgtaaatcacttccttagttaattagataatcactaattaatataattagataatcagttaatcacttccaagttaattagaagggattggaaaagtcactaaaaacatctaattaattgtcatcctgatactttaatggaattgagatttgtatataattaagcaagcaagtaaatgcaaaaaaaattggaatttaattgtcttattttagtggcttatttgttgttgctgttgttctgaaagccagtcacttaaaaaaaattttttttgagtttttagaaaccagtggcttttttacttttgagtttaaatttcttttacacacaactttcttctaaaataaggtcagatcatattatttctctcttataaacagtatactttaaaataatacattgtgtttgattttatcttagttatatcacagaaataaaaattgagataaaatggaatctattttatgcattttatggtatatgtgtgggcagctcttatatttttatccattcatgtattcatcagccaatactgagtactcaccaccaatgactggactggtagcaagaagaccttgctaacttattagagttataaattactttgttaatagatgtcacagctaaactctgtagcagagaagaactttttataaacacatgaactatgttctttatacatgtattcaaagatgaattgtttttggtgttgattaatggggtaggaggttgttagattaaagtcattggaaaattatactatttaaattacacaagttttatagtaagttggtctcagctaagagtttcatatgctaacacatgatcaaggtgtgtagaagcattataaaatcaatagttagctttataattagaaaagaacatgaatgcagttgttaaacatgatgatttttgttctcttttgtagcacaattcttccttatggctggacctatttatatcaaagagttgaaaatcccatttttagttattttccattttatttttattttgagacagggtctcactgtgtgacccaggctggagtgcagtgacacaatcacagctcactgcagccttgacctcccaggctcaagtgatcctcctgcttcagcctctcaagtagctgggactacaggcacacacgccatgcttacataatttttatttatttatttttggtagaaacagggtcccactatgttgcccaggctggactcaaactcctgagctcaagtgatcctcccaccccaccctcccaaaatgatgggattacaggtgtgagcccctgtgtccagccgttttttttttttttttttttttttttgagacggagtcttgctctgtcaccaggctggagtgcagtggcatgatctcagctcactgcaacctccccctccccggttcacacaattctcctgcctcagcctccctagtagctgggattacaggtgggcaccaccacgccgagctgatttttgtatttttagtagagatggggtttcaccacgttggccagcctgatcttgatcccttgaccttgtgatctgcctgcctcagcctcccaaagtgctggcattacaggcgtgagccactgcacccggcccagccaatttttttcttttttttgagaaataactttgtctatatcttattccagaaatctttggctagttttggtaagtttttgaggttttaaatttaaactaaaatatgatacaatagtgtcatcattatgaggtatagtcattcaatctaccaatttgttggagtagaaaaaattctactggaaagcctcccacctgtttatataagggcaggagaatttgctggcttctctatatcactgagttttgtacttttgtagattattcgatcttataatgtgaccacaggaaatcaagtgagtttttcacagcaattcatttttctgagttatatctcgaggactgagtaaagatcctattgacccttgttcatacacaaagtcatgaatttagagaccctggtatttcaggctgttgggtgactgcagctgtaaataaatacttattagatcccaacttccttgtagctagtaggagatacattttgacttctgagacactctactgagagtgttaatgattaatattaagtatggccagtagttgggaaggctattataagcactacagttttcagagggctttcaacttttttctttttttttgtattctaccatgaccaagctattgcaatcacatatgatagacatagaacctgcagtctctggagtggcatcttgttcagacagggagaaggagggtggaagtatggatgaaggaagttttgccctgagttatttgttgaagcgaggagatgggtacaaggaggttgatgtatagtaaacttacatcattgtattctgcacagttaatcagtcatatttaggtttttgtttgtacttatttggtaattctcagctgtgttttgatgagttggatggatttatttattgtctcatagtggctatagaatgattggatgaagaatataaatataaattgttttagaaaataaaacaaacttaaaattggagcaagtaccaagcagatctgaaatacaaaccagaggaaataaataatgccgttaaaattacaagttcagtggatggatccaggaacagattaagccaggattattgaacaaaatgtagctctgaggaaaatttccagaatgcagctaagtgacgaaggaggaagtcaagaaggcatgaaggctataattagaaggtctaaatatgtctaatcagagttccagaagaagacacaagagaataagaaaacattcaacaaaataaaaagtgagaattttatagaattctttaaaaaaaacccaagttctcagattaaggagacctaatgaattccaggcaaaaggaataaaaataaatcactacacacattgaggcagaaaaccagataattacaagcagatagagaataaatcaccaacaaaggaatggtggttagactgatgactgactcctcaaaagcaacaatggacactggaaatggaatagaatcttcaatgtgctgggaggaaataactgccattccggaattttctgactcggtaacattatatttgaagaagggtaaaataaagccattttcaacatttaaaaaactgaatttgccatcaacttctaagttttcactaagagcaatctgaaagaatgtgttttaagcagaaggaagatgattccagatgaaagttctgagatgcataaaagaattaaaataatgaacaaatagagtgctaagcatgcgaccaaatgtaaatgtaaagacaagtattggctataaaataatatatctattgagaagaaaaaacaatatggaattaaagtagatgagggctggaaggggatgaatggagttaaattgttctaaattgcgggactgtttaggaaaacagcaaacatacagattaactttagatattgacaggttaagaatgcatattatattttccacacagggacacatggcggagaacaacacacactggcacctgtggttggggggaaagcatcaggaagaatagctaatggacgctaggcttaatacctgggtgttgggatgatctgtgcagtaaaccaccgtggcacatgtttacctatgtaacaaaactgcacatcctgcacatttacccctgaacttaaaataaaagttgaagaaaaaaaagaatgcatattatgttttctaattttatggttttgcctttcacatgatggctcttacaatgatctggaaataagccagtgaattagcacaaagagctcagaaacagatctgttgcctatagaaactaattttgtacggcttgggcatttcaaatcaatgaggaaagaaatggagtatcccatatttaacaaatggcagttgtatttctgtctaaggcaaaatttacctaaaatataagaaaatgaattccagattcattaaagataaaaatgtgaaaagttaaaaactatacaacatttagaagaaaacacagaataatatctctaggaattagagtaaaggagtatttttaaacaagacacaaaaagtgaaaactgtgaagtacaaaattgatactgatttagcaatttttattcattaaaatataccataattataatgaaaaaagcctcaaacagggagcagatatttagaagtcatgtaactgacaagcaattagtttccagaatatggaaaattcctacaaatcaataagaaaaagaaaagcatcccagtgagaaagtgggcaaaatatgaatagatttgcagagaagaggaaagctgaatggcccattccacatctgccaatcggaaaaatttaaaaagttggacgatagcaaggtggccgaggggaattccagtccattcatgttagctgtataagtaggtacaatcactttgtaaaatagtttgagattatcttagaaggctgaacattcatatagccatcactcagcaaacaattcctaggtgtacacttcagagaaactcttgtaaatattgaacgatagacatgtacaagaatattcacagaagcattgttcatattaacaacacacacacgtactaacatacacacacacaacagaaaactggaaacaactcaaatgttaagagtagaatgaataaatgcgttgatacatgttcgtacagtgggatgctatgcaacagctaaaaatggataaattagctgggcgctgtggctcatgcctgtaatcccagcactttgggagcctgagttgggtagatcacttgaggcgaggagttcgagaccagcctggccaatatggtgaaaccccgtctctactaaaaatacaaaaattagctgggtatagtggtgggcgcctgtgatcccagctattcgggaagctgaggcaggagaatcgcttgaacccaggaggtggaggttgcagtgagccgagatcatgctactgcactccagcctgggcaaaagagccaggctctgcctaaaaaaaaaaataaaaaaaaataaaaaataaaaataaaaaaaagataaattacattattgacatggataaatattaaaaaacataatgctgaaaaaagacaacagaatccatccagattttattgatatatagtataaaaacaggcaaaacgaaataatgtatgcttaagagatatacatatagataatgtagattgcaaatgatggtcacagattcctcctgtctctgatgcacactcctttgcaagtcctttcagagtctgaggggcatctagaccatttccaatttttgaagctcctggtatattaaacaattgaaaaaaatttaaagtgtttatatttcctttacattaccatttgcaacacaaaatctcataatacaataaacctgtaccaatcacaagatttatttaaaaaatactaacttattttagtgtactataggctacgtggtccagtgtgggggcatagtttcaacggatgagatggatatcttaatcgtgatcctcctgcgtcggcttcccaaaatgttgtgagtacaagtgtgagccactgtgcctagccaagatggatataatcttttcatcccagaggtgacgtttgaaaccagatagggctgcatttggatttaacatcctaaatctctgactgggaagccacaggctcaacggtcctcttcacccctgcaattggctccgtatccgtgttattttgcccatgtccagtgttatgccaaggacaagtgagtacttattttacacaagcttgactaagagagagcccaactgaattcctcccaaaacagaagaataatttgtcaccaagactaattctagttcctacctctagaatcatagtaaagaagttactgacaatttaaaaataatattagcacctgtttctagccatcattagttcatgaacgttgaggtccagtctcaaacacctacctaaaaatgcaaatctgattatttcacttctgtaaaaaactgacaacagtatgtagtcaagtccaatatacagctctcaaagatctagctcctgcctacctttttagaccccctggtcacccctccatgcctcagatggcacactccagtaacacacaccactgattcctccattccatgcttctgtatactccatccccttctcttcttctgcatgtcatctcttccaggaagccatccctgtgctctcaaattccttccctccaggatgaccaactgtcctggtttgcccaggacacagagctttctgcaatgtgagactttcagagttaaaactgggacagtcagtcccaggacagttggtcaccccgttcatctctcctgtgcatgtctctctttcttgggtatagtgtgtgcatgggctttggccctgattcctttgtggaatgagtgggtgtgggacatggggaataggatgagatgagaatgactgggtggtgatagtggtaccccatggcaagggggacactgggacaggactgggagatggtttgggagatggtttacttaacataatgacctccagttccatccatgttgttgcaaatgacagaatctcattgcaaagggaaacatggtgtgtttgtggaaatgccaagtttgtagcacttgtgtcagatttaggtggaggagacctggatgaagaggaagactgttgagtattctgatttggagaccaggctgggagtgcataataaggtactgataaggtacgtaggaaaggttttctccagtattattgatttttttttttttgagacagaatcttgcgctgttgcccaggccagagtgcaatggcatgatcttggcccactgcaacctccgcctcctggattcaagcgattcttctgcctcagcttcccaagtagctgggattacaggcacctgccaccatgcccatctaagttttatatatatatatattttttttgagatggagttttgctcttgttgcccaggctggagtgcaatggtgcaatctcggctcactgcaacctctgcctcccaggttcaagcgattctcctacctcagcctcctgagtagctgggattacaggtatgtgccaccatacccggctaattttttgtatatttagtagagacggggtttctccatggtggtcaggctggtctcaaactcctgacctcaggtgatctgcccagctccgcctcccaaagtgctgggattacaggtgtgagccaccacgcctggcctaatttttgtattttttagtagagatggggtttcaccatgttggtcagtctcgaactcctgacctcaggtgatccacctacctcggcctcccaaagtgctggtattacaagtgtgagccaccatgcccggtgccagtcttgatgattcttatgtttatccctcatatataaattaccaccatgattctagttcactcagtcttccaaaactccagagtcaaatctgcacagacagaccacaggaaacagcatctcctgggagaggctgccatcttgcatagcccttgctgctgcctggaggcttcttctctctaaactgctgcattatcacatcattgagcgtttcattcattgtgataactgaagactgtagaatttatggtgcttgtgaaagctctagaaaatattgcctagctataggctataatattgttagctaactaaatggtaataaccaattagcattgaacttttttagactatgttctaagggagaaatcatcagtgatttaattttctgatatgcttttatgttacttggacaacccaaacttactatttttgaaaacaagtaagcaagtgacaaatcactcaccatgtgtttttatttttcatgaggcttgtttctaaatacaaagaaccatataggctatcatatctgaaagagcccttgaaagtcatgtaggccatcctcattttacaaatgaaaagctgaggcatatgcagattaatgacttgcctatagcaacggtacaaatatagaaagttgagattaagctacataatatttgctctgcaaattgatttttagtgcttttgcatgacccaggaaaactgtcttggcaacaacatcctgatgtataaacaaaactctcatcaacgaaattactgcttaaaaggtgaatataaggtctatactcaatacatttttgtttctacctggggctagagacctcctctttcaatatggtccttcccgtgctactaatcacacaaaattgaaacaggtgctctaagatacggcggcgatcattggctccagaatgctcctagagcaaggcacgatgtatatggatgcatcagactagatgaagagatgtattattaattcgtttttcagaatgcaaacggcagatgtgttcacatttctgctcggtggggtatttcattactttttaatgtgcacacacttaagtaaaaagggaaaaacaaaccatacaaagcatccgactggttaaaagagaagcttcatattgaaaatttgttgcagagtacaggattgagcttgaaatggagggatggaaagagagagggaaagaacgcttttcccaacacctaattttgcaaggaagagttgtattaataaacaggttttaggaaaactgcctgtaaagattaacatcttctgggctgggcgtggtggctcacacctgtaatcccagcacttcgggaggctgaggtgagcggattgcttgagcccaggagttcaaaaccagcctgggcaacatggtgaaaccccatctttacaaaaaatacagaatttagccaggcatggtagtgcgcgcctgtgatcccatttactcgcaaggctgaggtgagaggatcccttgagcctggcaaattgaggctgcagtgagcggtgatcacgtcactgcactccagcctgagcaacagagcaagacactgtctccaaacaaacaaacagacacaaacaaacaaacaaacgaacatcaacgtcttctgagtcaggcagttggcaaaagatgaaatgaagttttgacaactggtttttaaaaacagaaacgtatctgggcaaattaaactatttatgatttgctgagtgcctcctgggtggtcagacactgctctggaggagcttgtggtctggcagaggaaatgctaacaagggcatgtatgaaaggaggaagcaaaagtccttagaaagtgctgtgaaaaatcaggaggaggtgaggctgaaagctgaagaagccaggaaggctttctagaggggtggctttcagagcaagatgtgcaacctctccctaggatctggagtcctagagcaggtggggaagagcagggcacttactcacccccagacctttcctggaggtgtgatctgggcttggatgggaagcaccggcatgtgaaaggccctgaggcagggaaatgagcagaggtgggctggaaaggaaccactgagtagagaagggaggaaaggaggctataaaggtcacattcattccatctcttcgtgtcttaactctgaaagagtcagagaactccaaataaagaccgctcacattttaacgtggttggtaaggaagatgagggtctgtgggatgtgggagcagaacagtgagaaaacatctgaaagccaccctgctaggaagccttccccggtttcttcggctttcagcctcacttcctcctgatttttcacagcacttcccagggattcttgcttgctcctttcctatgggcccttgttagtacttcttctgccggaccccagggaactctgaagataaataattgcaggctgggcgcagtggttcacgcctgtaagccgaggtgggaggattgcttgaatccagttcaagaccagccctgtaaacatagtgagactccttctctacaaaacattaaaaaaaaaaaaaaatagcagggtgcggtggcacgcacttgtagttccagctactttggaggctgaagtgggaggattgcttgagcccagaaggtcgaggctgcagtgagtggtgactgtgtcactgaactccagtctggggaacagagcaagaatctgtctctaaaaaatcaacaaaaataattgcatgagtcaggtcaatctgcaggcttagggggccaggtgatatgttcattgcgtagttggaaaatagcatgtgataaggtaatcagtccggggatagtccagtttggggtgtcagagggtcaggaggaacagctccactgtgaggagccccatttaacctgatttagaaaagggaaggcagagaagcatcagcgttgaaacagggttccctagtgaccacaaccgttgtagacagtacacctttttgtggtttagggttttattcctgtaatatgtttcgtagccttataaatccggggctttacaccttgctggggacttactaggtgtcaatggagatgtggtttattaattgtattcttttttaagaataagttgctcctatttggctttcacaatgcagctaatatttttgatgcctcaggttctatgaaggcctcattgtttggcgttttctacttttttaagcaatgaaaatgtggaaaagcctggagcaatttcttatgcgtttgacacatatgttgagggatattaaataattgctgcccagagtaaaatataacaggtttttatggccaacccttatgttgacagagtgtacaggctggtagctatgtatactttttcaaaataaatgcatctctgtgaaatgagctatcatctgaaagcatggagtaattaaggagcaatatatttgttccaaggaactgacattaatgttgacacacgatgtttctaggcaatttgatctataccaataattcactttcttccctacagcaggactcattttgttcctaagtcattggaggctgtattagagatttatctggtggctttttaaaagcacattatttactacagtgtgtgttgagccaccatttatgtttattgatcgtaataagtatggcattcaaccagaatttggattcaggtttttaatatctaatttagattctttcccttgattacactgacatagggccttagcattgttaaaactgaaaaactatacagcaaatttgaccctagatacaatgatcaatcaatcgaagagcaaaaatggaaaccagttattctggctggtcacaatctcgtattaaaatgactgatctgggcctggcacagtggctcatgcctgtaatcccagcactttgggaggctgaggtgggtgaatcacctgaggtcaggagttcaagaccagcctggccaacatggcgaaacccggtctctactaaaaatacaaaaattatctcggtgtgatggtgggcatctgtaaccccagctactcaggaggctgaggcaggagaatcgcttgaacttgggaggcagaggttgcagtgagccaagattgcgccagtgcactccagcctgggcaagaagagcgaaattctgtctcaaaaaaaaaagaaaaaagactgaggtttgttataatgattatgatcattttgtctttgcctttttatttcttagtatcccagaaattatccaaccaacatttttgatgtggaaatgtgaatgaaatctcttttggtagaactacaagaaagattttaaaggtcgtattttttcagttttatcaacatggacttagtaagtagcataacgtcatcagactgatctggttcaacttttatgttacagagttgtgagttgttgtgagttgtttttcagttccatggaccccctgagcatgcccagatgaaccaagtgtgcaggaacctaagtgcttggactaaggagtggggactgaattaagaagcggacaccccatggcagggtccagtcagatcatgcctcccagcatcacctcattgcaggatcagatcatcctcattaccctatggttatgaaacctgacctagcctcaagctcagggagacagatttgagcatttccttcagtttccttgtcagtctactcacaataaacctttctcactgccaaaacccagtgctttggtgcttgacttaactttgcctgagggcaaacggacctggtttggtttggtgacagtagtttgtgtgttattttaaagcattggtgttttaaaattgtactgagatattaatatacagaggtaataatccccaaagtaaaactatcatcataaaacctttttgggatggaatagctctttttttttgagacagaatctcgcttttgttgcccaggctggagtgcagcggtgtgatctcggctcactacagcctccacctcccaagttcaagtgattcttttgcctcagcctcccgagtagctggaatcacaggtgcgcaccaccatgccctgttaaattttgtatttttagtagagatggggtttcactatattggccaggctggtcttgaactaacctcaagtgatccacctgccttggcctcccaaagtgctgaattgcaggtgtgagccaccgcacccagcctggaacagctcttttaatgagaaaagaataaagtcaatttgaaaaaaaaaaaaaaaaaaggcttcaaacccgagcctgattcaaacattttaaatctgtcttttaaagaccattccaaaacttatgcttttatcataaaacaattcattggtaatttattttggattattcttctgtatttctccttgtaagtgtatttgcccagtgtgttactctgacatgccccatgttagtagctgaaccgttattaactattgatctataccaataattcgttttgttccctactgcagggctcattttgttactacatcatgtgaggctttcttagagatgtacccagtggctttttaaaagcacacattttactaccatgtgcgtctggttacaatttatgtgtgtgtatgtatgtgtgggtatatattacctatatgcagtgtatgtatatatacacatatatatgtatatatgtgttcacaacattctgatgtaaaggatatgtcagatttctatgttccttgatttagagaaaaaaggttgatgacttattttttccattttctaatttattgggaaatacgatatacatacatttaacaacagaccaaaggaaaaaatgaaagaatgcctccatcctggtgtgcatattcatgtgctattcaaaaccaccccacttcactttttcctcttttttccactgatgattctgagcactctgctaatgttatagatacccaggattgaaaacacagactttagagatctggacttgaatcctatttctgctacttgcttgggcatggttcataacctctctgagcctcactttcctcatatggaaagtggaagaccataataatggccagcatggtggtggtgtgaggattaaatgaaatgccatatctgaagtgcaggtacagcacctggcatgtaggaagcacccagtgaggtgtagcttcttagtggcagccgtgatcatagtagaagtactgtaattgtaaacttggtggtggtggcaaggaaaaggccactaacatttacccttcagtatgcactgagctagtagcattgtgtcatggatgctcactgagcctgtgcagctagtacaaggtaagctgaaggacaacccggaggaaaatataattgagaaaacacatgactactttcaaacatttacagtgacccagaagtataagtgggaggagccatgaatgatttacatagaggatccacatctcagatatttatggattacttaagataatagactgtgtactgggcattgaggacagaaagatggataagacaaggtcctgtcttccagtctttcccactcctctgtgtgtgtgtgtgtgtgtgtgtgtgtgtgtgtttgtgtgtgtgtgtctgtattggggtggtgagagccagagaagaaaacctgatggatgagaccataagagatgaactcacctccctgggtgatgtccggggctggttccgtgcttttgccccaaggagttcatattgaaatggagaggatggataactcaagctccacctgacctcctagaagagtgctgtccagtactgagccacataggtaattttaaattttctactagccaaattaaaaaagtagaaacaggtgaaattaattttaataatatcctttgtttaacccaatatatccaaaacatagactcaatatacaattcttaatgggatatttattttattttttgaattacatctttgaaaagtggtgtgcattttacactcagagtatatctctatttagacaagccacatttcgaggactcaataggtacctgtggttagtgtctaccttaagggacagggtagttctagagctctgctactcaaagtatggtccttggcctcacagtttcacagtgtagatatgccctctgtcccttccactcctcctaaattggaatttgcattgtaacaagatccatggtgagccctcagagtttgagaggggctgtctgatgacttgaaaatctcatttgaggaaactgcacaccctcccttctagtcatatttgtgcagtacatttcctcatcatagattaggtaaaccatcttatcatagtcggaccaaaggtagagttcagtttagcccttgttggaaccagtgggatctagttgggtttttcttagtcggaaggttgagctatttggcagaaaatgaaggagagacaggacaaagatgagatacgagtgtttattcaaccacagaacaaatgacatcaccattgtcattggagctcttcttttctgacatatgttttgaaagggagaaaggagtgaagaagggaagagagtgagagcttccaaattcatggggttttcgttatgtcagagttcttcccctagggttagcctcatgagcacgtgagcttggaagggcctggcacttggattaatgctctgctgttgcagtgttgaaattcttgacaattgggtccggcatgcctgctttataccgagccctgaaaattatgtagcttgtcctgcctcccctaaatgtccacttactatccacctgcaggtgtaagagtcacactggattaggtaggttttgggaggcattttctctttatgtgtgtgtatgtatgtgtgggtatatattatatatgtggtgggtgtatatatacacatatgtatgtatatatgtgttcacaacattatgatataaaggatatgtgctgggccaggtacggtggctcacgcctgtaatcccagcactttcggaggctgaggcgggcggatcacgaggtcaggagttcgagatcagcctgaccaacatggtgaaaccccatctctactaaaaatacaaaaattagccaaatgtggtagcacgtgcctgtattcccaactacttggaaggctgaggtaggagaattgcttgaggtggaggttgctgtgagcgaagatcaagccactgcactccagcctgggcaacagggagagactccatctcaaaaaaaaaaaaaaaaaagggatatgtcccggatcagctggatcaggtaggtttgggaggtgttttctctttcacttccccatcaccacaatctctttatagcttaagaaataaaaaagagataacacaggcctttgggagaatcgagatcaataatgcattagataatggtgttctgaggcaggatttcaatgaaaggctaagtgctgtaactatgtaacaaaacaccagcacaggacaaagagtaggtttctcaatcaacaaggataaacagccccaccctcccaaccttgtctccaggtttacaattatctgcagtgtttgaatagagctcagagatctctgggcagtgacaatgagtcagctgggcccattcatgttggaagttttatatgggtgaaagttaaaaatgttaacttgtttctatgttgtaaaaatgttaaacaaagaataaaagtatattctcaagatgactcatgaggaaaaaagaaagtatattagtagtttcagagctcagacctgaatcaaatgcctgaatcaaatcaaaaactactcaaagctttgagacctaagaaagtcactttcttttaatactaatggacttggtataatttgtaatgcctgcagctcagagtttaggcggagagtcagccacattggcttcacctgggggctgattacagatctcaggccacccccacaccccacacccatcgccaccactgacctgctgaataaggatctgtattttatcaagatctacaggtgatctgtgtgcctattagagtttaagaagtgctgtaatgttgcactcagcaactacttatcttggcggtggtgggaagggaggagggaaatctaaccccttcacaggtgcatcaacttagtgcctaagacttcttgaagcattatgggaaagcgagggttctcaaagtgtgggcttcagactggcagcatcagcagcacccaggagcttgtggcagtgcaaattcccagactctgattatctggctcagaaactctgggagtgggaccccacaatctgtggctccatcttagcaagtctttccagtgcttcggatgcatggtaaagttggagaaccatggctgtaaagtatcagtagtcgaggagcaggaagatatttccactggttgtacattttagtttagaatgcttgatcttgtcaagcggagccccacattgaatcacatgtttcataaggcagtaattctaactttgaaagaagtcacgatgctctgactaatttgaaatttatttttatttctgagggagatttggacatggaaagggatggcaagaagtgaaatggttgaaaaaataaagagtatgacatgatctggcaattattaacctggggaagtgaagagtgaaagaagaagcaatcgagccacatgttatctctgtaaatggtgaagtgactcaccctagggctcaccaggaacaggaagatgtcgtttctttcttgcctccaagtggcaagcagggactgtgtgtccttcattcatagctgcttgagaatcaattacaataggtgggatgctgtgatagccaatagggttcagaaatcaagacacagtccatgattccgaggaggcggcagcctagccggagacggtgactaatcgggaattatatataatgttcacgaaaagatttgtggatatagaggaaggatccccaagtaaagctgggtgggagggagtcattgaagttttcctgaaagtgcagagtttgagggagagtccaagctggaaaagcacagggacatggaggtggcccacgcatccctaaagtgcagcgatgagtaactggtggataagtcacagcccataaatctcagaattcatccattcactccacaaatatttactcagtacctgctgagggcctggcactgttctaggccatgaggatacttccgtgagcaagacaaacacaaattcctgctgacaaggcttcattctagcaaagggatataaaccccatacagataatatatatgtaaattataagacaatgtgatgtaatcacactggaaaggtagagaaatggcaaccggaggtgtgagatggtgtaagaatcctgtgatgccatcttctacaatggggatttaggtctttaatgtcttctttttttttttttttttttttttgagacggagtctcgctctgtcgcccaggctggagtgcggtggcgtgatctcggctcactgcaagctccacctcctgggttcacgccattctcctgcctcagcctcccgagtagctgggactacaggtgcccatcacctcgcccggctaatttttttttgtatatttagtagagacggggcttcaccgtgttagccaggatggtctccaactcctgacctcgtgatccgcccacctcggcctcccaaagtgctgggattacaggcgtgagccaccgtgcccggtctttaacgtcttaagttgataaaacaagaaatagcagtgtaagcatattccttagagatatgcaggttaataccagaaacaatagctaaaagatttcagagagaaacattcaggagtggggacaccaggggctgctattttttactatgaaccttgtatagtatatgatgtattcattcattcactcacgcattcattcatgaattcacaagtctgtgtgaatatcagtgtgtgcaaggttttgttgcagatgctggggatacagtagttaaaaaaacacaaacgtttctgccctggcggaacttagattcaggggtgggagctagaggtgaagggagtaggtcagaggagaaaaaggaagggtggggagggctgggaaagttgcccttgtgtgtagagagatgagaatgggcctccctgtgagagtggtatttgaatgacagcaggaagaaaagagccatatggcagctcaggtgcaaaggtctatagcagtttaggtgtgagtgtgggtggagcagtggggatgtgggggtgctcagggatggaagggagggtggtggaaaggacctcagcaattcggaggtgaatggtgagggatgtggatgccatcatccagcaaggaacctgccttttactctgtgatatgagaagccaccgaactttggcgatggagtaattccttatatctttaaaaagaggcacaaagaccacacctcataaatactgacatcatattaacagaatagataatacaccactttttcaaatgtatctttttttcttttaatcgctgagagggaaaagtagtatcagtggcagcacacacacacacacacacacacacacacggaagaaatggaaataaaagctaaagaacaaactagtaatgattcggagtgagacccctaacacctcccgaatgggggcaagaagctcaggactctggtagcccaggcagagtctgagtaactggcgttgcctctcttcatgcatctacctgatccacctgtccttctacccacccctctgatccctaggaattctgagagcctggtatcacccaggtacaagatgaagaagtctattgtcccctagagggtaaatggcaagaggtgcagtttaggaggattctcagtctgggaggagaagctagctgagagcttgccacagatgtaagcaggaacgcccggctgaagtgggaacgaggcagaggctggaagacacagcagagtgctgtgcaacagatgccgcctggcagacatggtgctctcatcacaagagactgttatttggtactgaagtagccttcacattccatagaaaaatgtctttctattttttatattatactttaagttctggggtacaggtgcagaacatccaggtttgttacataggtattgatgcgccatggtggtttgctgcacgcatcagcctgtcatctacattagatatttgtcctaatgctctcctcccacagccctccacgccccgacagtccccagtatgtgatgcgcctcccaccccccgtgtccatgtgttctcactgttcaaccccaacttatgagagagaacacacggtgtctggttttctgtccttgtgttagtttgctgagaatgatgctttccagcatcatctatgtccctgcaaaggacatgaactcatccttttttatgacggcatagtattccattgtgtatctgtgccacattttctttatctggtctatcattgatgggcaattgggttggttccaagtctttgttattgtgaacagtgctgcaataaacatatgtctgcatatgtctttatagcagaatgatttataatcctttgagtatatacctagtaatgggattgctgagtcaaatggtatttctggttgtagatctttgaggaatcgccacactgtcttccacaatggttgaactaatttacactcccaccaacagtataaaagcgttcctaagaaaaatgcctttcaatcctttaccttattccatgatcaccaattttctgatacctaattcagtgtgcaggcacattgattccaagacaggttcatggtataatggcaaaacaacagcaagacaacttccattgtaaatgaacgggggcttcttgttccttgggtttagctggctccattcccttagctcctgaccaaccttggtaaaataaaatttctaaaccttgaagcttgaggactggacctttaccaacaaatgtgtgttgaagagtgagcatgggaggtgcagtgagtgtaggggctcacctggaaatactccgctcctcctaagcattgctccagcgtggcacccacagccacagaaggaagcacagcacaggagatccatcagggtgtcccatgaaatgctgcatccgaagcatgggccaaaatatctagacctcaatgaagagctataaaggggtgttaggggatacagcatctaacatagaaagcacgctgtccatggttattaagtgaatgcatggatgaacaggaggagtccaaattatctgttttaaagaggaagacatttctttgtgtttttaatccttcttgtttttatggtgtctactaccaattaaaatgtattgtgccatgtttcttaattaaaataagaaatttgattgcatgtttctgttggtaaatgatcatacaagaatcattcatgtcagctttgttctgggaatgaacacaggatatggggtcaagatacgtggggtaactctgttaccaagacctttaaggaaatagtattattgaatagaaaatggaacatttgggctctgaagtcttatttcatgacatttaaagtgtttatttagctctggcttcctctgctggaagattgactttcttatttgctcctgtaacggatggatatgctgtgtggctgtagagctccttccctccctccctcctttccttccttccttccttccttccttccttccttccttccttccttccttcctccctccctccctccctccctgcttgcctttctctttctttctttctctctctctctttctttattcttccttcccccctccctctctgtctcccttcccttttcttttcttttttctttcctttcctttcctgttttccttccttccctctttcattcctttctttccatccctagttttcttttcttttcttttctttttttttttttttttgaggcagagtctcactcttgtcccccaggctggagtgcagtggtgcaatcttggctcactgcaagctccacctcccgggttcacgccattctcctgcctcagcctcccgagtagctgcgactacaggcgcccaccaccagacctggctaattttttgtatttttagtagagatggggtttcaccgtgttagccaggatggtctcgatctcctgacatcgtgacctgcccgcctcagcctcccaaagtgctgggattacaggtgtgagccactgtgcccagcctctatccccagttttatattgaattataattagattcaaaagaaacctttcagccagtggtcctcatccttaaactgcatattggaatctcctgggagacgtaatgttgtaggctaaggatataattcaggctattactgaattataaagcgtgctgtgttcatatcctggaggatggaattgggtcacagtgttttcaagtctgaaaaatcagatgccatagttctttgtgtttttaagttagagtccattgccttaagtcctcatgggcattttaagaaatagatcaaagtatttgatgagctcagggtatgggcacccatactttctcctcgctttatccttcaaattagtctacttagaatttgcttttaaatttctgcctaattttaaaaagacaattgtgggactgagttgctgtcctaccctttttctttaattgttatttgacttcagactcttcctataactcatgtgtgtgtgggtgacactcctctgaaaaatgggccaacagaagggcttattatttgggccactgtggtcatgaaacccaggttcacattgattttattgcaaaatttagatacatgcaccagtccacatgttaatttgcttagtattcttaccttttaaaatgtttttgcttctcagacccttgtgatttcaagtcagaagtccctgacctcttaatgcttgttttttttttgttttttttgacacagtctgcatctatcccagcctcagtcctcaacttccactgctctgtgtagcataatccccatgcagtcccacagttacagtcaacagggcctttcctccatctattagcaaacattcctgttcttagagcctcagagagtgaggcaatgacaggatcacgattttaacatttcccctttcctgaagcttctttattgggacactggtgttaaaaaggaaaaaaaaaaacagcttaattaaaaatttttatgtatcatgtggagcagggttgcctaaatgagaaaaagatacttgaaatcccagcctctattttcatcagtcagaggaattcagaggaggctcaggaaaattgtgaggacagagggctgtgtcctgagtccctagcctacaatccctgtgtccatcagtcaaggagggcagcctcatcacagctgcaggctctcctgcatatctttgtcaattgtcgaccgactaattctattcaggttgccttttgtaggggtcagcagagtaggatcctggcaatttcatatgattaaaactattttgaacaagacccttggctaggatctgtttcaaacgatgaagaaagttcttttttcattgttacaggaattgtgtttaatgagatgtagaaggctgtagtgtaaaacttttttttaaatggggttaggaggtttaagggagataattgaaaacctggttatctcttgttttagtagtggttctttgctgctgtacatgtaacacaaactacttgaatttcaagatgctaccatcccttgggcatgaattatgaatgtttgatattccttgattccatcacaggacttgtatggttgatctttgtccaacccgagccttggatcaggaaaaaggatgagttcgggtttatgttgccctatagccagcagggggtgttcgtggccttcctattccaaaaggccgcagcaccctctcccaggctccgggtgaaactggtttgtgagtcaccattaccatccttctttctctgttcaaattggcattttaccaagaacagcattacttctgagtgagcaacagctgaccaattatcttgaaaaatatttgggaagctatacaattttaaaagtgaaaagcaaaatatatcttctatttttaacttgttccctaaacatgaattacctgggggaaaagcagatgcttttcaatcttttaaatgattgcacctattctaaaccatccaggtgtttttgaaatgacccacagtcatctttaatagcatgcgaaggggccaaggccctctcaactttagatttaatagcctgcccccttcaattgtcagagatattgacagagataggcctgactgttctgctgtaatttcaactcattttctcctgctctaatatctatagtacgggatggactttttttttttcttttctgtagaggccaggtcataaatatttaggctgtgtgggctggagagactgttgcaactactcaactctgctgtccttgtgcaagagcagctgtagacaatatgcaaacaaacgttcatgactgtgtcctaataaactttatttgtaatttggccacgccctatcttattgatagccctccaaaacgtcagtatcttccatatatctgttattttatgttgtttataaactcaaactcttctccgattaagaggaaaataatcgaatctgaaagtccctcaggttcaactcctttcccaatgcctggtcccccttataacactcttgacaagcatctttgcccactgctcggaactctcatgctttgtgtcttccctgcaacacaagcagtggccccgaagagcagacagcgtgatacaaatgcacagaagtttttaaggagatagcacaacaatttagaaactaaggctgctggaatgatgagcttttaatcttttcattcatcgcagggtttaatccatatttgaaaagaaagatgccacagtataaagctgacaggcactgactggcctgaaatatctcaggaaaatctggtttcagatttttctaggagttgatccaagaacatttttctttctgccttttgatctgttgaaagatccacaagatacttggatgccttgaagacataaatgccagtacagaaataaactctgacgagttgtcttgtaaagggagccagctcttagagaagggatcattgtaagggtaggaactgaaacttttttgtctactacctgacattctcaaacccttctttcctttgtactttttctgtgaacagatggtttcgtccagcttggagtgggtttaggggagactgagaaaacaagacggctgcctgcagttttagtctctctttacccatcttaaactttttcttcccctctccatttttgagagcaagaggttacatgctccctttcctcctgtagaagaaacatttagctggggctgacacaatggcgaggacatgagaaatgaccacaggagaagccctggaggcagaagactaggtctttgccccttttacagtgagatagttttatataaatatcagaggttactggaggcacccaaacaaaattgaggacaggaagcaaatatctgagaggctcccaaacctcgatgtactgtgggacccaaacgagcacgtgaatcccttctagatatcctttggatcctttaagagtagcacaggcggggcgcgacgtttcacggctgtaatcccaacactttgggaggccgaggcgggcggatcacggggtcaagagatcgagaccatcctggcctacgtggtgaaaccccgtctctactaaagatacaaaaattagctaggcatggtgtcatgtgcctgtagtcccagctactcgggaggctgaggcaggagaattgcttgaacctgggaggcagaggttgcagcgagccgagatcgtgacactgcactccagcctggcgacagagcgaaactctgtctcaaacaaacaaataaataaataaataaagagtagcagataccacttataaagttttattataaagaattattggagttggctatgaattctcctccttactcacgtctggtggggcaaaacggggaggatcagatactatgaagacaaagatactggaaatagatcaaagccttgaattcccagccccagactctacccaccatgatccctacctgcaggggtctgggttcctcttgcccagcctgctcaatctctgaccccctagcatgggtctctggcttgctcagaggtgcaggctcccagctccccttctccagtcgcctgaagactcagtggttcctctctgaaggatgtagttttaacctttgtttgctgtaaaaacatatagcaggcaagtgcttgtcacaaggggacttatttcttccttctgcttcatgtgatggggagggtccggctgtggatatctgctgtgctaagacagccacagtgtggtctaagacagagcctggtcttggccactctgatatctggctgactgagagacagtgtggatgggtggaagagggcagtcttgcatgctgtcatctcctccctagggccctattgacctttggtggatccacacttgaggtgtggacagaggagagagacagagaatgccttgtctcctgtagaaaggcctcttctggaaacttccaagcacctaacattgtaggaggagaataggagactgagagagaaatataaaaagccatgttcccacagtaagctctcctaccactggctcagcctcctgtccatttgggaatgattagagatgctacctccttcctcagggctgccaactacaagtgcgcagcctcccccaactcttagcactgtagccaggtgtagttataaataaacgttggggtgacttatccttgtgtgatgtgtgtaagttagccctttctttgattaactataaatacgtaaattagatattccctggtttccccaaacactggtagtagtgaattttcttggaatgcccttctttggtctgctggctgattattattttcagacgacactaatgacggcccaggtgtgatgtctacaaagccccacattaaggcgcttgcgtagcaaacctgccattcaggtaatgacggccgccctctggaaaaacaagctgagaccataccggggaaggccttggatacttgagaagggtgtgaggccagtcacaggagttgactcggtggaacggggcataagagttacgggtggctttatgaagcttttgttgagtgtgggagggtggaaagagctttactgaagagacatgttttctgtttcccagttcaaatcaatttccttatcatgatacaagcaagggtaataattattaggattatttaccatgattatgggtgacaggaattgcagttgggcaaagggactcttttgtatattgtaatttccttccctaaagttctagcttccttattttgtcttcctaatagtgactcacaccgcagtaggcaggaagcaggtatttaatgaccacttcttcactggttctttattccaactccattcattccaatacaaatttcttgaaaacaaagaataatgacatccataacacaaatgaaagcagcctgtctaagctgatttaatttagtatggaataggacgcaatttcacagttagagttattgttgtttatttttttttattattttttttttttcagatggagtctctctctgtcgcccaggctggagtgcagtggcgcaatctcggctcactgcaagctccgcctcccgggttcacgccactctcctgcctcagcctcccgaatagctgggactacaggcacccgccaccatgcctggctaattttttgtatttttagtagagacggggtttcaccgggttagcctggatggtctccatctcctgacctcgtgatccacccgcctcggcctcccaaagtgctgggattacaggcatgagccactgcgtctggctgttgtttttattcttaaaacttcagccatcatttggttcactgaagaaagaaatggcccttgaagagaatttagaaagatttttataagtgaatactcacttatacataaatatagacgtatattttttagtgctagttagctaacacaatagacaatcctggacaagtgttttccatcctctcctgtgaatctgatttgtgaacctctcatagcttttactacgcatggagtccaggaaaaatttgggacaaagtgatcgatcttaatttctagacttcattctgtcttctgttcttggtgagaacctaagaaacatcttccttccaggcctgacttagtgctcttgcaggtttagcttgcttggagcaagactgtgctagtgggattctaacgatgccacctttcctgctgtgttgtttatcctgttcagttgatagaggacctattgagactggtttatagacacgacactcactgtggggaatgcatcgaattgctaattgatcaaaatcacccataatcttgcgactcgtggatcagcagccttagcatcctctgggagcttgttagatgtccaaaatcttgggcctcaacccagaacaattagatcagaatctgcattttaacaagatccccatatgataagtatgcacattaagatttcggaagcactgacatataaggcttgggactgggtggtgacctgaaactactgcttcctagggtgctggggatgatacatgaacattttcacaatattttttttgtgatgaatctctggataaaatattctcagctgatgactgttgatggtattgggtgtatctgtggcctgtccattattactaccctgtctttgtctttcttgtcctatcatattctgtgagtgtgtggggaaagaaaattttgatagaaaacaggagtgagtgtggagtctaactggacaggttggggtctgaggtcctccaggtttggaacttgctaaactctctcagggaagcaatcatcgtccctgatgctgattcgttttaggctaaaacaagttaagaacacacctctgtatgaaagcagtggatgctttgaggtttgattaatgagaaggtagcttttggttataaaaacctgtcctctggtcctgagtgtctatttctgactcatggatcttgtcagaacaagatccaggtaaatgatgtcaaactaccaattgcctctgaaaaatatgagttctgattttcaaatagaaaatccagatttctcatacctgggctcttaccttagataaaagccatcagcaagggctcatcaaaatgtgttgcccatattcagattttacataactctctagcaagcacttttgacttgtgtggcacaaagagtaaatatactgggtacaaattctgtttccaccattttatagctgtatgaccacaggcaagttaatgcagtccatttgagcctcagtttccccaatcataaaataaagataatgatatgccacaaggttttgataaatgttaaatgagattgtgaatgtaaagctcagtcaaggatagttgttatttaaaaaacttctggtacatgtgtgtgtatgtcaatgcatacatgctatgctgcgtatgcataccatggaattagcaaaaattgacttgtagtttctattagatgactcataattttattagatgaattcccatttaaatttcaatgggaagtttgggtgagtaggacaacccatgtactgaaatagttacacacacacacaaagttcaaggtaaaacttctgagtatgattagatcatcagatcgttaggtatgtgagaagcactgtcttttcctttttgcatgatctcacctccagtatattttagaaactctctaactctcttcagagagatggtgacacgtagatgttgtaatagaatagatgagatgggaatgagtcacacatgggaatgaaagtaggcctatagtcattcggaaaaccaatgttgttaccatagggaaataaccaacaaaatacttcaggtgatatgtaaacaccaaaaatctgaaaagtatttattgattaaaagctgtagaaaagtatagcatttagagtatagcattgtgaataatcatggctagaataaatgaattatactcttaatgacttttaaatattatgactagaagctacgtaataattatgatcaccttaatttgtaaatgacttatagtttcttggtgagggagaacattgcttaactatgttgaaaagagatctcctttcagtgaaactgttggtttgtgtggtattggaggcataaatatttgtagagaaattgttaatgtccctggaatgaggaactaaaagagagtcaaaaggaattgaaactcaacgagaagaaaaagaatttccttgggcatcccagcatgcttaagtgaggagcaggggatgccctgacttcaggttggagctacactgcttggtcccacttgggaaggagcagagaggagagctgtgaacatcatgtgcaatggctttactctttaccatctctgaagagggtagacctttgcttttctcttgaaagttttgatgtcatctattgttattagaccaggactttcattagaggtccatgtcagtgttaaaatgactagtatgctggtcaaaagtttggtgggatgcaaatgaactagttcgccttaaatcagctattgtcactgagcaaataacagagtcttctgtttaaaatactctgtttcacttgcctattgcggcatgaaaaatgaccccaaaactcactggcttaaaacaaccaccattgtatttgttcacaattattttgtgggacagaattttggattcagaatagcagggatggcctgtctctgctctgtgatgcctgggggcagtggcattgtcttgaatggctggaaactggctggaatggcttgactcagtcatatgcctggagcctcagttacagctgttgcctggagcttcagttatggctgttgcctggattcctcagctttccttggtgtgggctctccaagaggctagcttagacttcctcacagtatggtgtctcagggtaattgaacttctcacatggtagctggctgcctatagggcattccaagagaataactcccaatgtgaaagcatttagtaagcctctgcttgtgtcaagcttgttgatgttccattggccaaatcaagtctcatgaccaagcccagcgtcaatgtgggaggcagtagagaaaggcctgactgctggaggcatggatgcattggggccaccaatatgtacagcatacccagaaaataaaaccattatttaaatgagaaatttaaatgcacatttataaatttttaaatttaccattataaataatgatattatttactatctgttttctgttgtgcaagaccaaataggtatatgtgaaactatggtacaaattgcttcatgtccatgaagggtatgcttagaaatatgttattttatcccaaagaaatggcacgctatattatttcacacaaagtaaactattcaaaatctctaagctaggccgagtgtggtggctcatgcctgtaatcccagcactttgggaagccaaggtgggtgggtcacttgagcccaggagttcaagaccagcctaggcaacatggcgaaaccctgtctctacaaaaaatacaaaaattagccaggcatgatggtgtgtgtctgtagtcatagctacttgggagggtgaggtgggaagatggcttgagcctgcaaggttgaggctgcagtgagctgagatcatgcccctgccctccagcctgggtgacagaatgagggaggccctgtttaaaaaaaaaaaaaaaaaaaaggaaaaggagaagaagaagtctcttcttagcactaaatatctaaatgtagtctgtgttaagtaacccacttacagctatctgtaaagaaaaatctaatctttcgtacatacctctggcttacttttttcttataattatggacattttttcatattggttccagcttagagagtgcataagttattttggcttttcagtagttcatacatttataattgttatttttaatttgctatgaattaaaaaatatggtatgttttcttcaattctgatgtttttatatgttgaagatgctggaatggataggaatgagacctgagtcccaggagggcttggataacttttctagtcttttgattccttatctctcacataagaagtttcaatcagttgatttctatgtttacttttaatgctgatatttttgatttcaaattacatgtaatgccctaattaactatttagagaaatataaaatgtgcatttgggaaatactaaaataatctgatatttctttaaggaaaaaaattgcttctttattccttaaattaattttttagtcacttggcttagagatgttttcttgatgggtctcttatttgcatacattactattttactttgctttgacaaaaatctaagaggtaaaagaaatgaggagtctaaaataacacacaaatttccataagagaaacttactacaggaacctaacactttggaaaaatatttgattaagtacctggaagaattttgctagacttaggtggaagtatgcttgcagaattttgtaaaatacttttctgatttccttgtcttttttttccagacagatcttgctgtgttgctcagctgaagtatggtgttgtgatcaaaactcactgcagcctggaactcctgggctcaagacatcctcctgccttggctcccgagtagctgggaccacaggtgcaagcctctgcactggtgaatttttaaactttttatatagacgaagtctcattatgttgcctaggctagtctcaaactcctggcctcaagtgaacctcctgcctcagcctcccaaagtgctgggaccgcaggtgcgtgccactgtgcctggccactaaaatacttttgtaagtgaagtatttgtctcaattctaagttttaattcagctgtatttcctggaagcagttctctacaattctgtaaaatgaaactctaatcactagtgcttggggattacgtcctttttttttcattagttgtcattaattcctgttgggagtattgaaaaattagtaatatgggaaacatacaaacagatcaaaaaagcactcatctgaaggtaccagtgtaagttcacaaacttggctgtacattataattatttgggactctttaaaacaaattgatggctgggtcccaacctccacaagtactttttttttttttttttttttttttttaatacagagtctggctctgttgctcaggctagagtgcagtggcacaatcttgcagtcgcggctcactgcaacctctgcctcctgggtttaagtgagtttcatgcctcagcctcctgagtagctgggattacagatgcccaccaccacaccgggtaatttttgtatttttggtggagatggggtttcatattggccaggctggtctcatgctcctgatctcaagtgatccgcccacttcagcctcccaaagtgttgggattacaggcgtgagccatcatgcccggccaaaagtcttgatttaattattctagagtgtggcctggcattagaattttctcaccccctccaggtgatcctgatgtgagccaagtttgagaacccctgcactaaagaaacgtcctcgggtctccttctgttccccaccttttgctgccagaattcgagtccttactccttgctagactttatgacctcttccctccacatactgttgctacattcctttaataatgaatttttatgtttagttcccgatttacacatcatcagcagggtaggtgtgtaaaaataatagtgaagacatgagtctataaaggtgtgcatttgattggattaacagtattagatggatctatctatccactccaccattttatgacactgtgggcaaatatgttaacataaatcctaaattccaaagtgatacattatacttctccggattagccatcggtttgtttagttggattttgggttatagaatgataattgctatttattcaaagtgtttctggaatgaaaacaatagaacttattgccacctcctttatgtgggttgggtgtatgttggtcaaattcaaatacaaacaaaatcttctttggttggtaattcacctgaatgcataggcattaattggtttgtaatgggcattttgaaacatttttacgctgatttaagtgtgggggaagattattctgtgttacctagagcccaaaatcatgcaattgtctctttattcaggcaaatggtttcatttctctcttctttcctctccttagtgaaacagaggcaatttattgatagggtgatcagccaccccagtttgcctgggactaatgagtttctgggcacactgggatgaattggtcaccttaattgatacagcgaaaattaataagactttaaagatattttaggtccttgcatgaaaaattattcatatgttatgatttacattaccaaatcatatataaactatgattgtaaatggaaggtttgtgattgttttctggatttggtattacaactttcttttcagcttgtcatattatttttagatattcctcaaaatatttttctagcagtattaaaaaattcaccttgagaaaaatagcatattttatgcacattttctagatttcaggaaacagataatgtccaaaacagcagaattagttggtgctaaaatagagaaaaaaaatcatttttagatctgcttggagactataataactagtaacataaagaagttctcttagtaaaatgaaatagaaaaagagaacctaataaagtctaatatgaatccattcttgacccaaataacaacaaaagtcaccatatacggccaggtgtggtggctgacgcctgtaatcccagcactttgggaggcccaggtgggtggatcacctgaagtcaggagtgcgagaccagcctgaccaacatggtgaaacccggtctctactaaaaaatacaaaaattagatgcgcacagtggtgggcgcctgtaatcccacctacttgggaggctgaggcagtagaattgcttcagcccgaaaggcggaggttgcagtgaactgagatggcaccattgcactccagcttgggtgatagagcaagactccgtctcaaaaaaaaaagtcaccacatacaaatgctgcacaaagaaaacttagtgaagatgtttgtgtactggttatttttgagtctctttgaaatagtaaagataaattattaattttacatcagagagttaatgtatttagttaaaccaatagtacacttttgctagggtgtggttattctgtttttattttttttcttttttctttttcttttctttttttttttttttggcattaaagatcagaaacaccaattgttgccttaaagggaagatgaatccaattttaacagatgctcagttcaggaaatatcaaaagctaccctttacaaaggagtattaaacatagagacaaaaaaatatgcagggcattgccaatgtatcagatgacaatgggactaaatcacacccatttttggtttaacagctgttaaatgagtcaagagacctggatctagatccagctgcaccgatccagtgagtgtctgggtaaatgccttcactgctctgggcctctgttgatttgtctgtaaaatgggagattttgactatcctgtgtctacagtctcttaaattgttaatatcctataattccatgtgcagtattctgacgatgtcttagtggatatgtggatttcccccttccttttctccagcagtgctcctctgcagcaacctcagaacagtggcccacactcctagaatttgagaaaatggcatcttcttcagaggacagaggttcgtagtctcagtggtttattcacctgctacagctcagcatgtgatgtggttttgctgtgtccccacccaattgtcatcttgaattgcagctcccataattcctatgtgttgtgggagggacctggtgggaggtaattgaatcatgagggtctttcccgtgtgctggtctcctgatagtgaataagtctcacaagatctgatgtttttttttttttttttttttttttgagacagagtctcactcttgtcacccaggctggagtgcagtggtgcgatcttggctcactgcaacctaagcctcctgggttcaagcaattctcctgtctcagcctcccaggtagctggcattacaagcacccaccaccatgcccagctaatttttcgattttagtagagacggggtttcaccatattggccaggctggtctcgaactcctgacctcaggtgatccacccacctcggcctcccaaagtgctgggattacaggcgtgagccactgtgcctggccgagatctgatggttttataaagaggagttcccctgcacaagcactcttgcctgctgccatgtaagacgtgtcttgcttcccctttgccctccatcatgattgtgaggcctccccagccatgtccacatgtgagtcaattaaacctcattcctttataaattacccagtctcgggtatgtctttatacccgagcatgagaacagactaatatggcatgatactctggatcctagtatttgcaatttgaattttggatgagttacttccccttttagagccatagtatctgtctgtaatgagaatttttttcccttaatctccttttctagcttagagtagcctaaaagagagttactcttttaggcctttcagcttttttcctttttaaaagtgagatagcatactttttggtcatctcacactcccagtgaggctttctgggcctccctttctctgtttcctcccttcccttcctactggcagaagtgtggattgtggagagcctcatgacccatgactcatgcctaggttgcctggctacagggtgacaattctgcccagtgtctggctgccgtgaacatgtctgatgtctggagatttctctggatcttccatggacgatgttctgagaaccccttgttaggatgaaaccctgaggtgctgtcttgccttatgatattaaaaaaagacacgatgcagctagtgcggagttttattggctacaaaatagatgcaaaatgatgagaatctgaaggctgcagtaggaaagtagagctttaccctcataaactcgcactttgattagaaaagtgcaatatattaagagcattatgagaagtctggtgagactgttacagaaaaaaaaaataaaagtttctgagtctgataattccaagggtatcttttagaactcactcactggtgtctgtgcaaggactttccttgggggaaaatagattttacaacaggcggaaactttcattggtctcatgcgtgcttttggatttcattcacttgacaaagaactaatcttccgttgatggtctcctgggttatggccttgatctttggagttgcagacactgagaaaaagagcatggaagatgtcactgccatgcttcttccaccatctgaactgtactcattttcatttctctgctgtcagcccctgaaggctctcagtgccttccaaatgatcactaagcaatgaggtgggctctgctgctgggaaaagggatttcccaaaggagggattttctcccactctccaggaaatgaggatctctgaacagtgtcaccttctggaggtgaagaccttcatcataggtgtgcctcatatggaacctagtctctgaccacaagcacttgaggagttctttctctgcctgtgggctttgtagcactgcacagattccttgagcttacagagcacttagtgctattcagggtacctcattttaaagtctagaaagcatgccacatgaggaatgggtgagaagccaaggatgcttaccatggctgttttcaaatatataacttatttgaataagtgcctgttgaaacatcaataaagcaattctagaccatagggaagaattgaaatcattaataaatttacaagggagaattttgttaaattaaaacctctccattgggaccatcccatcaagtatgggttccccatcctaagacatgtgtgaagagagtctcaaagacccttgtcttattttgtagatgggtagcagtgagaccagctgtcctgtgatgattactccaactgattctttgaatctccaatgccttagaataggtttatcacaaactaatcagaaagtgccacttgtcccagactacagtctcctgcaacttttctgtgagatattaaaggtaatctgagaaagcatgtttccaggtcaaagatgtttgggaatactgggctaaacaaagttaaacttttgttgtttctacctctttcttgttccttttctccttcaaagcagtacctgttccatctttaatacactgaactgcaacaggactgtccaagaagaggatcatggcacacagtatttctaaccttatctggccatagaacacagtgttcgtaatacactattcaaatctcatggaacacgagtgttcaacagaatcatctgagaaatgaaatcatgaaatcattgcctcttagttttctaggggtttagtaaactgactccattacttaatagagacataatactattaattatcattttaattttctttactgcttgcttttacctatattgaggacaataatgagagcttacatcattttgtattagctaatttgttcattgaagattcctgacccaggacattttgaacccaggacatttgggagtacattaaggattatgactactacaaaatggataaccatgctaattccttaaaaacagagattcaaacaatgaaggaaattttttacctttcatgctcgactttgattcttcccgtgtcctataaaagtgataaaggttaaagctcactttagtattagcaacaatcataacaacttctcaggatgaactaacttccttcgcttgcttgtaaatcctctgctctttaatgaggataattgtctgagcttagtagtctcaaggtcatgggttcacgggagaacccgtctggatacagaaggcattgggtaccgcctcctgctaaccctggagtcaggggaagtccaccaaccatcccctcctttcagctgcaagcttggttttctctaggatccctgccagggtctgggtctcaagcctgagacccctgagcttctcaggctgttcaaagtttggtctagtgatgttttatttatgtatttttataaaacttctatcccttcctttcggatcatagaatatatatgccctttatatggccagctgttgttatttcctggggtggccagaaatatcagattgaaagtctagacatctctagctcatatgcatctttttttttttttctcttttgctggtggactaacacattccccctgccttcttttttttggagccaaaattgtgtgcattcctactgggaaacacagtggccaaatccttttgaattgtttccttctagagactttaactcttctgactgcaaatcttagtgtcctgtgagtattagttgattaattatacttgctgcttagtgaaatacagccagctataggtatcttctggagtagctcaacacaacttttctcttgctagagtgactcttgctaacagaacccaaagatgcacacatatacccacaggagctggaggtccctcgcatgctcctctcgtgccagcctttgccttacccttcactctctccctccaggagccgtcggtacgtggtgatttccttctccaggtgggttttgatgcccagcagcacttggtattcattgttctgccgctccagttcatggcgtagctgcgtcagttcctcctcatagtgggagatgatctcttgcatgtcctggagcttgcaggagtaccgagactgggtctcggataacatgttttccaaagcagatttctgaaagaggaaatgatcttctgttaattaactgatggcttgattgagtcaataacaggtgattgttgagtacttagcagatgtcgaccagttggctaggtgtcttggtagctgctgaggacaccaagatgagaagtaggctgacttacaggtttgggacttgggcagtcaggagttgagcagtgttaggacttttgaagtccattgccttgctctgaactgttgtttaactcctttcattttatctttgacctgattgaaaactcccaaagagcgacagcaactgggactgctatctctttgtatcttcggagaagggtctcaattagggatgccagataaaatagagaacatctagttaaatttgaatttcagatgagtaatgagtaattttttagtgtaactatgtccaaaatattgctccagtattgcatgggacatgcaaaaaaaattgctttttatttgaaattccaactaaactgagtattctatattttaatttggtaaatctggcaaccctagtctcaagcaatgctttttgattatgacgatggtaaaaaaaaaaaatgtcattttttgaggaaattctaacagctgccaaatgaagtttctgggctagaatatggaggattgagttcaagtcccagttctgtttgcatgtaacacctgcttttctgaagcgcataattttaaccttaaagagaatctcctaactgtgctggatactctccctttatcgtggctgctaattttcagggggccgttcatgctgcctggcggttaaagcacatttccctggtcagccagtctcctactctcccaggaggttattttgttccctctcctctgtccttgccatccttcctcggagtccatggcctcgcttcctaattttgttgatgaaatgaaagcaatcgggagagaccgcccactgctccctacattgctcccaggcacatacttgaatctgcatctgggtgctggcttccctctgttcttttgtgtgagctgtctgtgctccagtcatctcggcagttgcccgccttcttgcgttatcaatattctctctggattattcccaccagctttcaaatagaataatttttcctaccttaaaatatatctttcttaaacccatatctaccttcagctatcatccaatttctctgctctccttcagctacagcaaagctcctcaaagagttgtctatgcctgctgttcctcttgagacccctccaaggtagcctacaaagccctacactgtctggttctgttgggactccgcggcctcaccctgtcttcctccctcttcccctcccttcccctcctcttctctcctttcttcttcccttcattcactcactgtagccacatggacttccctgctgctcctccaactcatcagacacacttgtgccttgtcgcttttgcacttgctgttccctcctcttggaacacatcccatcaccacatcaagcacctccttacctctttgctcactgccactctaacaggaaaacctttcctgaccaccttgtttaagatagcagctcttcaccctggtgcatctgccctcctcctctgcttcatctctgtagcaattttctccatctaacatatattttgatgatttgcacatttattatctgtcactcctactagaatataaactccttcattaaaaaatcctcagtgctaaggattggtgtcagatagtagaatgcatgaaaatgggtatacatgcctcgcctgtttcacagggccattgtgaaatactgtatgttaaaacgttttgaaagttgcactataattatttttgtactcatgatctctacgtgcacatttgcagtgtctgttcaccatcacggatgcataaaacacagcagtcatttacccaagtgcacctgcaacataaatgaacaaatcattgcctctcaagactgagggtagaatcgcacttggcaattatatggatgaatgattagaagactcaatagggtatactgggaatcaaatgatagaccttcataaattttgaatgcttatgaccatgctaagcatttttctaaactgtgaagatgatagaaatgacttggacacaagaacttagagttttctgggtgataagacatatacataaatgaatagggcagtgctttggagttagccaggcctggatctgccacctaccatgttggcactggaatttctctacattggggtttgaggggggtagcctggttgtaagtggagagggcactgatagaaattatgggggtctagaatcccccttcctccaaataaatcatatggtttcatcaccagttacttactagctgtgtgaccttggccaatttattttactgttggagttttggtttcctcatctctaaaatggggacactaagacctatctgggaaggttactgtaaggattaatgacatttaatatcatgaactacttagcacaatgcctggcaccatcgggacactcaatacatggtagccctttattatggttctcatcataaacaatttggatggaaagtggaaagtgagagttgtcccaagggagttgagggtcagggcctgggagagaggtctcagaaggcttcgtgaaggaggtggtgtgggattcacggttttcctagccttgactcaccgtgctgtactgtgtctgcaggtcaatctccagggcctggaatgtgcgcttcagttcgtggatgtcaccttgtctgctctgcacagtggctggactggctgcctcctgggacatggctgcagactgtgggaccaagcaaggcaaaggcgtcagcattgggacctcatggaaatgcaacctttgggaagtttgtgcatctttcttttacctgttctttataccaagtgtccaagtctcgatgcttcttctttattataagctcatattcttgtctcatatcctccaggaccttaatcagatcttccctgggacctgtatccaccttcacattgacattgaagtcacttggcacatgatgcttctccatttcctatttaataacagagaaaggaaatgaaccggctttgacaatcagaaggctggattgccatgttgattggcagtggtaaatagatcttttaaacattccgattatgtggttgctcccactgtcactggtttggtttctcaaatattacttacttgttggtgataaaacattgtatacttttttctctaataattttataaaataaagaatatctttgagaccaacctgaccagcatggagaaaccctgtctctactaaaaatacaaaaaattaactgggtgtggttgtacacacctttaatcccagctacttgggaggctgaggcaggagaatcgcttgaacctgcgaggtggaggctgcagtgagccgagattgcgccactgcactccagcctgggtgacagagtgagaccctgtctccaaaaaaaaaaaaaaaaaaaaaaagaatatcataaggcaggtaatcaaatagcctccatgattactgacttgatccgtggttgaaaatatttcagaaagaattatgcttccatagtgtgcaaagtcctgttcagcagatgtggattggtgaagtgacaacatagttaagcagctgaaccttacaggctataggccaaagcttttgggaagcagttcaagaggcaaacagcagaaagaaggtgtagaggctttcaaaatctcatcaatgccttgtgacactgtagggctgacgcccataggatttcatgaaaaccaagcagccacaggaaaggtttaattaacaatcattgtctaaccagctattcagaaactgagctctttgatgttgagaagcaattttgttttcctaaaatgggaactgtttttctatcattttatcagagtcttgaggacttgtgatggatggtaactctaaaagtcagttaaatgcttctggaaattaggattctttatttttgccccacatcacacttatcttggttggtagcagactctcttcattatattgtcccctaacttgctgaacattgggccagtgatggaagtccagtctcacgcattgattcttatagtaacattaacaagcacatctaggtaaacattgtgtattaacaaaactgttgaccaattcatcattaattatgattgcattttggttgttgtatttgacatgtgactagctaaccttgaaattagaaacattagatatttgtatgtttttctaaagactatttagggtgaaggacaaggggattggcatccaggtggtggtttcttctgtagctgtcgaatcagcctgagatgtgcaggctaagagctgtgcttattagcaggtgttcctggggagttgtacctgctcatggtgcttcttcatgagaatgagctctttcctcattccttccacctcctgttctaggtctgttgtgacaatggtcaggttgtctaaggtccttcggaggccctcgacttcaatttccaagtctttcttaaaggagtgttcattttcatacctttggtgagaaggaagagaagagtgcactcattgttggaaggccatggtttttgaaaggattcattttcatttagaggtgaatcttttactttttaggtttaaagagagcaaatgaatacatataggatgtcttttttatgccagtttcatgctacacttctccatgatggtgactcaatgtcaacttttaaattgagtagggagaataggataataaacagtcatatacccattatctatatttagcaaccatgaatgttttgccatatttgcttcatctatttcattgctgaagtattttaaagcagattatagatgtgatgacattttaagactaaatacttcaggatgcatcttttaagaaaaatatattttaaaataaacaggccgggcacggtggctcacacctgtaatcccagtactttgggaggctgaggcgggcggatcacgaggccaagagattgagaccatcctggccaacatggtgaaaccctgttgctactaaaaatgcaaaaattagctgggcatggtggtgtgcacctatagtcccagctacttgggaggctgaggcaggagaatcgcttgaacctggaaggcagaggttgcagtgagccgagatcacgccactacactacagcctggcaacagagcaagactccgtctcaaaaataaacaaataaataaataaataaataaataaataaaataaacataacactacacctaaacattaataacaaccctttaatatcatctaattcttgattcatattcaaacttccccatactataatgtgctttatatctgatttgtttaaactaaggttcattcaagtaacacacagtgcatttgccgttgctatgccttttcattataagattttagatgcgggtaatggcaagatgagttttcctttttttttttttttttgagatggagtctcactctgttgccaggctggagtgttagtggcgtgatcttggctcactgcaacctccacctcctgggttcaagtgattctcctgcctcagcctcccgagtagctgggactacaggcgtgtgccaccatgcccagctaatttttgtatttttagtagagatggggtttcaccatgttggccaggatggtctcgatctcttgacctcgtgatccgcccgccttggcctcccaaagtgctgggattacaggtgtgagccaccgcgccccgccgagttttccttttgtaaagcaaacaaacaaaaacccgaacaaccctgtgaagaaggaacttacttgaggttgaagtcatccactgccatcctggcattgtcaatgagaagaataatctgagcattggtcatcttaccatccactatctgtaaaacatgcacaaaagcacaaaaggttatctcacttggacacacccacacatgaccgctgcatgtctgtcctctagcttcctgaatatttgacttgttagtacagacaacttcttgttctggcagtggaacaatgaataaccgaatcagtaaatgcttagtgagcacatactaggtgcaaagcagaatgattttaaaataagaatatgatctgcagtcagtgttactgccttttttctttttatgttgagttttgacaggcttggattgatgcaactgctgaaagaatgatataggaaggggaaggacagtaattgttcaaaatgccctctaactttttaggttatggacatgtcatagcattttgcttaattaagctcatccacagctgaagatgttaaaaggactttaggttctgatccttttcttattgtattaggttggtgaaaaagtgatttttgccattacttttaattagttcagccctccaaaaatacaaaaattattatttcaggtgaacataattcttacttgtgatagcaatcatgtttctaatcagtgttactgagcaacgctaacactaatattcaatgtattttgtaatagtcatcacagaacacattttttttttgcccgaagtgactgtaacttgaaggtgtgtttatgtcattgcaacttattctgtgatgagaatgtgctcattgtagctattaaaatattaactgaaataattccttaccatctaaggaaaatgcttaagaagcttcagtagtggtaaagcctccagttaaagactttcactagatgttcgtataattttttttttactttgaaaagaaaaatagtattgaaagcacttactcgagcaagtgtgtatacatttatgatttgtaaacacttgtaggtatgttatagtcagagaaatagcacacatttgatgtatgtcactgtctttagggtagaagatgtctcgttgtcaaaagtgtaataatgcttttacgccaagtgttgtgctggactagaaacttagagcttttctttggttctggctctgttcttgaccatccatgtggatgcatcaggctgcatcactctactctccaggcctcagtttcatccattgtcaaataaggagtctgtactagagacagaggaccttagaggtcttagctctaagtttctgtaatttagttggagtcagagaatcctgggtaattcccattatatttacatagctcattcctttatttagaaagcattttcttaggacaaagctatacttcagtacaaaggcaccttttaaaagtctggtcctatttaaagctccactgatcccatggaatttggtatcatgaatgcacaatagcaggatttagagatggcatgaatgctgggtctggaactcaaagagcagggcctgggatcctgctccgcgcttactggctgggtgagattggctgagtgagcttggctgagtctcagtttattcatccataaaatagcaataacaatagttacttcatcaaagagttatgagaattagaagagagtatgtcaaataatgtcaaatagcatattatcggcatattatagacagtgaaaaattggtcgaaactgaatttgttcagaaaaaagtaaataatacacctttctttttaaaaatctagcacttttatagattcagtgactacactgtgaacatccccaggttctatatgctgagatgcctgctcagacttttgctgttcatggtgggacatagccaggctggctgctcctgcctcattctttttcctcttgtgggattccaaatggtactatggccccttcccttgctataaagaaggacacttttagatatttccttgtctcctctccacagtgctgcttaggggcattcttaccaatacttctccctccagaccccttattctttgcattatgtaagctcctgcaaaatgaaaagtagctctatcccaaagagcctgggggccattgtggggtaacccttacttacttgtgcactgaggttttctatttgacacacactatgaggtgttaatctacatccagagaatcagaaaatcaaaaatactgtctatgggcttatttagcttttctgggttaaattggtaatttatccattgcaaagtccacctcaagtgtctgattcccccagctatcattctcatagcacacaaatgtgaattctgaaatgtgcttgatatagagcacgtttaaaactatttcccattattcaggcttacttagtacagaattatgatataaccatcatttctgacacaatcttcatggtaataagtggatgaagatgggttgagaaacgatatatgaggcataggttttttactgagtgttgtaattaatcacccagattctcctgaaggccctcagttcattcttttaaaagcaagttggcatattcttgcagcattgttgcttcaggatgtttgatctactagggagaggaaaacagaatgtttgactgtaaacaaaaatgccaaatatagtccgattgagaatcattcaaggtgttttatttatgatactcctatgactgtgtccaattctggatttcaaaaggattgaattaatttttaagctcaacttgttatcaaccttttgagtgatatttaatatacctaaagtgagggtacgggagaactgtatccactcagagcatttcaccaaggtccaggaaggataagccccaggtaattgtgggacctccttgcacctctgttttctcatcttcaaatgagggaggttggggtagatagacaacctcaactttaaagagtttctttcttcaagtgtagagaaaacacaatgttagaggtaaaaatccagaaaagagtgaaattcaaagccaaagaagtttcctattcaatctcagaacccagaattccaggtcatctgaagggtgggcaggttgctccccacaccccccattgcacctactcacttttctcaattctgttccaaaggatttagacaatgattaggtctcagtctccttatctgtaagttgagaatacaaatacctgctccacacagttgtgaggattaaatgagacaatgtgtatgaagtatgtgatgtgtggttaatgatgcaagtataatgcattatctttattcatactaagtgtcatttttatatgaggtgggctaggcagcactacactgtagtgaaatttatgaggctactggaaacagacctgagttagaatcccacctctgcttcttgctgatggctttggatggctatttcacttttttccaagcttccatttccttacagggttcttgcagaatcaaataaaataatatggaacatttccatcattgcagaaaactcttggatagtgttgacatgtgtattaaatatccagcaggatgcctaggtacataataagtgctcagtaaacatttccctctctttcctccctttcttttttttaaatctcttccgcgagctcataaattatttgactggttctaaccttgtatttcttttgggagtcatggtctccctttgctctccatttgcaaaaatcttcaattcctcctttctacaaccaaagcaactttattaaacaaaaaaacatgatgaggactgttgagtcaccttgtttttttttttttttcataaagacaaccatgcactatatagttaaggtaattacagtcagttattaggttgattattcaataattagggttcattacaaggacagatttatattatcttgactggtccttcctacattcaagcaaggatgactgagcattgtgaaataatatatataaatattggaaacttgtgataccctttctaggggaggttaaatcatggtcttacagggaattttctgggactgctttatataagaggggagttagatagctttaaaacataacctatgagatgattggattccttctacttctagctaatgttatgagacatcccagaaggtatttgcttagcttttttgaggtttggttaaagagttcggttttttttgaacaaggtctttatagccatctcaactctcagattctaaaaattatgctcattttattattattggttctagcaatatgccattgtcagaactgtgagcaactttactgcaagcaacccacaaacggaaatatctagggatgtcatgatgacctatatgctggtgtggtgacaacttttaggcataatcttcaaaatagtgtaacagccttttgtcgatggataaccacattgttcaaaaaagtttgaggtggagcagaactgaggtaatgagaaagtaaacactctcttatgcctggtgcactgagcatgcagcatgaacaccagcccttatcatttctatgacatcgttgggtcataagtgacattaaacagcagctggttgcctcacattttaaagatgtttttggtctgtgagaaatcagtagtctcatttttgaaacagtctgtagcacttctatcatttttgctgccttctttttctacattatccatggacagtagactaattaaacaaaacagacgtttcccactccaaatttaagatataataagaaaacatcccccaaaacctttgtgcacaattacttcaagcgctgatgccattttcctggaaattgtcttctggactcatttttcctcccgagggtcccctggcaaagcagccccatctggatctccagggtcacccagcatcttacctgctcctgcaggtgtgtgatgttttcctcatactgggaataatctttcttactgccaggatctctctgctggtgccatttcaggatgcggctttccagcttcatgttggcctcctccagggcgcgaaccttctccaggtaggaggccaggcggtcgttgagattctgcatggtggccttcccatttccgcctagtagggggctgcttcttccagaaccccaagaccctccagggggtgggcagctccgcgtggtgaaggacagggagatgcgggctccccccgcaccgccatggacggtgggagccctggggaagctcctgggccggccccagccacctccggcgccatggaaggaggccgagggggtctggctgaagctgtgtccggagttcatggtcccatctgtgtttgggacggggctgagctctgctccactccctggcaccgcagaactgagccgccccagactgccctggatggttttatggcctttgctgtgggagttcccttctctgacaattgtaccaacaagattgtatcattgtgcaacttgtgtttcctcttggtcaatcccaaagtgcccctgggccttcgcacactgttgttgtttagagccacatcaatatgacagtttgcttcctcccttcccctggtaacccggaggtgtggcccacgacatcaggcgggtattgggctcaggtatctttctaatcttgccgtgaagtttttccattgttcatttacctggaatgggttaggttaaagtccacccaaaagaaagcatattcgatgtagtatagatttccttaaaaaaaaccaaaaaccaaaaccaaaacaaaacaacaacaacagcaacaaaaaaccagacattaaacaacagagatacacacacctttttccacccccaataagccccacctctaaagggagggtgagcgagcctggagaagggaaagccagctcagaacaggatctcaggtcccagaataaagcttgctgtgctgaggcagccgagaaggtggtgaatatctgatgcctttgtggcagtcactgtttgaaggaaagtactttcaaaggactcgctcttaagaacaaaccctcaattatagatgtaattaattaatgaatgaccgaaccttccacttccagggtgcctttcatcccagcacacctcaaaaccaaacaaccctggcctgcgctcaggatttcccttggccctgggggaggaatgtagccgttgttagcagccccggaccccggctgagcctgccacggctgggctctgtgtgtctgtgacctgcagagggacgatggaaaacaggaaacctgccatgggctgtcaaatgtggttgatgaatcttatatttcatctgccaaggtaaaggttaggaatgaataaagaagcagtctgggggcgggagccacgtgctagttactggcagttggatttaaaggggacttacaaataaaatatcagcgcaggaagggcttctggcctttctggttccaagccactaattggacagatgaggaaagctgaggcctatggtggtggggaggttagtggcagagccagggctagattctttctccacatagcactgttatcttgggttgaatcttgacaggtcctgtaccacacttctctttcataataataggacttgccaattggtgtagctcttttatattctttattgaatcctcacaactctttatgtatccaggcaagggttgttgtcttcattttgcagacaaagaatcagggtctcatagggatgaatgatccagagctgattcgcatgtacagtgtaattgagcacatgaattcataggtgacactgcccgagtctgtgctgtcctccctgcctggaaagtcactcacccctacctcttctatagttcaagggctacctccttcaacaatcattttctgaattctcctgcatgagttgggtgaccctctaggaggaaactgcctcttctggatgccgaggtcctccagaggggcagacaccttggcatcccacctcatggtggaagctgggagcccctagccaggcgcagccacctcctgtgcctgggatgaagtccactccgttctttcactccattatactgcatttgccacacccttctgagaccgcaggcttcttgaaagcagagtttatgtcttccatttttgagcaccaaagtctggtttcttggtggtattttgcaaatgtatgttgactcaatcataaactttttagagtcaggattttaacacaggtctcctgatgccatcaacttctgctccttttaggactgtgagttatagaactagaaagtaggaaaacgcctctcctgggtatagattaaccatccatgaaggccaatcttttccaattacaaataaagccacccaaaagcacaccagctctgctcctcccagtcttacaacaaaaccttatcagggaagagtctctgaatattttttatttcactgtgcacgagctggaaaaatgagcctccaagcctcagggaagcttggagagtgcttagaaagagtgccgacagtcacttacatctcagatatgagaaaaagacaaaagagacaagtgataaaaatagagcaaatgagggaactagagagacttgtttggcgagtggtggcaaccagtgttctgtggatgtggacggttcctggtcatcaaagttatggtcagctctggttcctgttcgcctggacccagacttaccaaggaagaaaacatttacctttagcatgtgcaagggccgggctgcactgcctttttctaaattctctcaccagaatctacaatgaaattaatgcttctctaattatttcaggcatgtctgagtggcagtgacttatcaaccccatagatttggccactgtctcattttatgtccatgtgtgggagttttgatttataggacttatccttgagcaaaagatttcttgtgtcatagcaggaccagggccaggaaaaactggtggtgagatctgagagcactggggagaaatagtctcttctagtactgttatatgatggtttcccataacttctttttttttttttctcaagatggagttttgctctgtcacccaggctggagtgcaatggcgcaatcttgactcactgcaacctccgcctcctgggttcaagcgattctcctgcctcagcctcccgagtagctaggattacaggtgcgcaccaccatgcccagctaattttttgtatttttagtagagacggggtttcaccatgttggccaggctggtcttgaactcctgacctcatgatctgcctgccttggcctcccaaagtgctgggattacaggcatgagccaccctgcccagccaattttccataacttcttttttttttttttgagacagagtctcgccctgtcgcccaggctggagtgcagtgatgtgatcgtggctcactgcaacctccacctcccgggttcaagcgattcttctgcctcagcctcccgagtagccgggaccacaggtgcgtgccaccacgcccggctaatctttgtagtttttagtagagacggggttttaccatgttggccaggcagatcttgaacttctgactttgtgatccacccacctcggcctcccaaagtgctgggattataggcatgagccaccgcacccggccctggttttccataacttctaatgtgtagagttccattggattttaaaagaaatgatgcttttttaaaagcatcattttaaaagcattaaaagaaatgatacatgcttattatacaaaatcaagtgatacatgatggtacaggaaaaaatatttaaaaattctaccacacacacacaacgtttggtgacatttggtgaacatcctttcagatactatgtgtatgtattggaagacaaaagaatggctagaataattggaaaaatgggctcctgcgacttattccattttagaaaaacttaagtcaattaacacattttaattggcaaataaggaactaaaatgaattcactttagtgacatagtttttctagaatttaaaaacgttcatcacattcttttaaattttacatttttaagaaggataaaatggcctgtaaatgccaggatttttggaatcgcaggactggaaagaaaagcaacgctgagccacttgttgcagatttttgcttttagggaggacaacggcagagtgctgagcttgtttttgaagtattcttaaagaacgcgagggatgaagcctccaactgcttcctcagtaaatggccaacatttactgatccttttggttcacaagcatttcacttgcaatatggtttcaggatttcttttggtatttctgtagagtgcaaattgttcagaatcaaaatcattctgctttgcatgattttctggctgaaacatttgtagttttcacatttgattcatctttctgatgaactcagttgtcgtcttgaaagggagtgggtactttgtaagacagctcagctgttgagtgaatgcatggggttgcatgtgggtgtgttggggtcagaagggagccctgtcagaaggtagctgtcatgaactgggtacaccgtctgtttgtgtgccttttcaagacaaccattccattaatgaagcattttataggcacccgttctttatagtagagaaagatggccaaaatgactctcaaatacatttttactacacatgatatttcagcacagatgagtagtaggtcttcaggcaaaattgctatgctattatcctatgagttggaaggttacataagaagattagacatttatagaaataaaacatgcccattaaaagtgggcaaaggacatgaacagacactatatacagatactatttgtaagcgactcaagttggctgttgttttcttcctcatttgaaatactgtattgaagacttcataactcacatcatctctctgttggcccctttttcctggacaaatagaaatatgagaaaacggtctgaggatcatgctgtaacaaagtgttttatatcagctttacttgaccactcatgcttatgcccttgtagcatcttatccattgggaaaatgttcccagctgaaaacagtcaattgcagctgcaattttaaacatggaatgcaatagatagactttaagaagttagtaaaatctctaaaactatatgcaaaaatttctctgcatgcttatatgcttgcttttctgaggaatagaagcttttattaactgttgtatttaaaaatttcaattaggccgggcttggtggttcatgcctgtaatcccagcactttagggaggccgaagcaggtggattgatcacctaagggtatgagttcaagaccagcttggccaacatggtgaaatccccgtctctaccaaaaatacaaaaaatttgctggacatggtggcgtgcacctgtaatcccagctactctggaggctgaggcaggagaattgcttgagcctaggaggcagaggttggagtgagctgagatcacaccattgcactccagcctgggtgacaagagtgaatctccatctcaaaagaaatttttttaaattaattattatttgttgagacagggtctcactttgttgcctgagctgtgggcagtggtgcaatcatggttcactacagcctcaacctcctggctcaagtgatcttcctgcctccacctccccagtagctgggacttacaggcgtgcatcaccacaccaggcaaattctttttttaatgttttgtagagacgaggccttgctacgttgcttaggctggtctcaaactcctgggctcatgcaattctcctatcttagcatctcgaagaggtaagataaaaggcatgagccacttcacctggcctcattaacttttcaaaggagtatataagtttaaaaagtcaggatccagtgatgtaaaactttagtttccttccctgttgccattgagctcctccttctccctttctcctccccctccttctccttcttctccttcttcctcttcctcctccacctcctcctcttcttcttctcctcttcctcctgcttctcctcttcctccccccctcccctcctccccttcctcctcccctcctccctctcttccccctcctccccgcctcctcctccccctcctcctccccctcctcctcctcctccccctcctcctcctccccctcctcctcctctttcttcttctttttctttctcttcttcttcctcctcctccccagtcgtcatcttcttcttccttttcttcttctccttcctcctcttctccttctccctcctcctccttcttccttcttccttctcttcttcttcttcttatcctcctcctccttcatcttcctcctcctcctcttcttctcctcctccttatccttcctcctcccccctcctcttcttcttcttcttctccttctccttcttcttcctcttcttcttcctcctcctcccccctcgtcgtcatcttcttcttcttccttttcttcttctcctttctcttctccttctccctcctcctccttcttcttccttttcttcgtcttcttctccttcctcctcttctccttctccctcctcctccttcttccttcttccttctcttcttcttcttcttctcctccttctccttcctcctcttcctcctcctcttcctcttcctcttcttctttcttccttttttactttgccatagagacaatactttaggttcactaaaatttttgcagttgtgggatattgattcaagcacctgctcatttaaagtggttggctatatttaaaatgtttttattgctttttatctcatacccccaaactgtgcatttcatctccaatttcattattggttgaattccacagccacaaatcatatgacttaaaatcttctaacttagttattaattttattgaagatttcctttaggggtactctggttttataaatagactaatatgacacaattcctacttaaaaactattttaaatttttattttaatagtttttgggaaacaggtggttttcaattacattaatgaatttttttgtttgcagatgatgcaatctatttttttaaattattatattttaagttctgggttacatatgcaggtttgttacataggtaaacatgtgccaggtggtttgctgcacctatcaacccatcacttaggtattaagcccagcatgcaataggtcttttccctactgctctccccacccgccctcccctgaaaggcctctgtgtgtgttgttcccctctctgtgtccagatgttctcatggttctgctcccacttataagtgataacatgtggtgtttgattttctgttcctgtgttagtttgctgaagataatggcttccagcttcatccatgtccctgcaaaggacatgatgttgttcctttttatggctgtatggtattccatgatgtgtatgtaccacattttctttatccagtgtattattgatgggcatttgggttgattccatgtctctgctattgtgagtagtagctgcaatgaacatacatgtgcatatatctttataatagaatgatttaatatttttttggcaggccaccaggtctgttggggtgatatccagtagcaggattgctgggtcagatggtctttccagttctaaatctttgaggaattgccacactgtctaccacaatggttgaactaatttacattcccaccaacaatgtaaaagcattcccatttctccacaacctcaccagtatctgttgtttcttgactttttaataatcaccattctgactggtgtgagttggtatcttgtggttttgatttgcatttacctaattatcagtgatgttgagccttttttcatatgataggttctttagtggtgatttctgagattttggtgcacccatcaccagagcagtgtacactgtactcaatgtgcagtcttttatccctcactccctcccactcctacctttaaagatccttcagcctctagatccaacagtttagttttattttgtttggcctttcagtattctgtcaaatgacacaacctattatgtgagggtctgctctggggtgcttaggagcagttactgatctttacccatttatacctagaattcagagttgccagtgctcaggagacaaagcaatttagcaccatcaccagtagagaaaacctggttgtcaagatcttttcacatagctgcgatgaagtcatcatcatctgagtgacatacttatcattcagtaccttggtataagcctgagaagaatgggttggcctagcccatcatactggtagttgatcctcatttatcattatcaccttcagagaaggagggcacctcctccctccttccagcttccttccttttccagctgacaccaaacctttctgaggaggcaagtgatgtttcagctagataacttctttcaaaggactgccagaacactctgacttaagcctggttttagaaagatccttaaatccttttgcactgcctctgtgcaaaaggcctgtgcagtgatttcattcccttaacacaacagcaggaaaaacagatccctgcaaatgggtgggaagtgctgttgcaaagctgaaacgacttcactcttctttttctccttatgattatcttaatctgatggacatgataggtaatcaaataaatcctttacacaaagaccgttgttgttagtgatcctggaattaacctgcgtgttagctttagtcctcgctgggcgttactttcttttgccttaggaggagatgttttgagttagctgtggtgttggtagctgaaacatcatctcatgcaatttgctgaagtcttgtccttataggttttacctttagctcagtgtggttcatgttgcggcagggcaagggtatgcaaggctgttggaaggtccttgctcccagcattcttccccacttgatagttgttgctgcctgaaactcaatcatgtatttgtttggttcactcaaatattgctgcttcttcttcgtttttctttctttcttttttttctttttcttgagacagagtcttgatctgttgcccaggctggagtgcactggcgccatctcagctcactgcagtctccaccccccaggttcaagcctcccgagcagctgggattacaggcgcccaccaccatgccctgctattttttgtattttttgtagagatggggtttcaccatgttggccaggctggtctcaaactcctgaccttgaaagatctgcttggctcagcttcccaaagtgttgagattacaggcgcgagccactgcatgcggccaatgttgcttcttattcagaaacaaaccttaatacattgttcacacaaaaaacccattgtttgccttttcattcattgaacaagtatttactgaatgcctaccctgtgtggagcagagaaggtgaggaggagggcagggtgagaggacgctggtggcgcacaggacacagggtcgttctgggctttctcagctctgctgagtattttgatcttcaacacaagagatgtggaaaatgaagattttaagcaggggagtactgcactgtgatcttcaaaaagatcaccctagctgtctcatggagaatgaatgagggtgagagtgaagtggtggggatggccaggaagggactgcccctgtccagaggagagacaatggaagtttgcttgttaattttgattgacttagtaagatattcagggatattagagtaagagcacagcattaactacttttctgccgtgagaaagaagacataataatagtcaataataaattgactattattatgtcaataaattgaccctgtggtgtgtatatgctgcatttgttattcgagaggattgcataatagacacggtgtctattatggtaccttaaactgtatatgtttgatatgtgtcctattcagtaggcttttagacagggagtaatcatatgttttgccaaaatatttttttgttcaaggctctcaacttgctttatggacaagtaactaccacgatggactttttcttatggatgtaagaactaaggcagtgaaaggaggaagacttgcctaaggttgtgcagtgagttaatggcaaaggggccctagagcccactccctacatggctgctggttcgtatttcacccatgtgcttacagagactttacccatgtgtacagtgtcttctcacatttacttctaggtttctcccttctatatgcgtgaatgctgttctcattacctattttactgctcgtagattactaatcacgactcgatttttagtttgcgatacaggtttttcttttcccttccctcctttcttttggtttggaatatttgcttttcaaagctctgttattctaactaaaacttttttttttttaatttttgaagatcttcttgatggtgacattttctgcatctttgttgcagtttggactagtgggaaggattttgggctaggggtttaaagtccacgctctaccgttaacccacccacctagcaacattaacctctctggtctcaaagttcttaccatgaaaatgagactgccaataattttccttgtagtttagagggttgttgtggggagcaagtgagttaatgtacatacataagctttgtgatctacatgtaatatatatacattagctatgtaataggtgtgtactttacatacatgagccacataattggtatgtaacaaacatacttgaactatgtaattttcaagcaatgtacacacatgatacatgtaatctgtatgtaatatacatacagaagctatgtaataggtctgtagggtacacatacaagctttgtaatctgtagactgctgtgcagagatgagggcagaggaggagaatgattaaaaaacacccgtattccaccctgaagtcaggatcccacaagtctggacagaggggagaccgatgaagttgtcaggaagtcacaagggctagatgaaaaagtctagcctaaaagctataattctgtccccaggtgaacttaaggagaaacaggaacttcaggagtttacattttataaacttagtccatgtaaagctcagtctagatttatgctgatgaataccctggttaccagctgtcagttcacatcccaattctgccattgctacccagttcttcagtctttaatttccacagctgtgaactgagattaatactcagccctgattgatggggttgttgtggaaacgaaaggagataatctatgcattatacattaaaaagtactcagtgatactattatgaaaatgtgtctgtgtgtgtttgtgtgtgtatgtgtgagtgtgttagaatactctattttagctaggtgaaataagcctatatctatgttctggttttggatacttttgctgagaagtcatatatatttttatagagtgttctaaacttacagaatttattttaatatgctttgtggcttttaaaatctcacttttctatataaattatatcctaaacataatccccaattttttgttttgctatattttattcttactattatcatgttatctgtttaaagttattttagggcaggcactctttccaccctagcagtgaactcatagttcttccctaggaaggcttgagtttccaaatacaggtaaaagccatttccaaatgcctttggttaggtcccactctggtcttttccttctagctctgtcaattagggaataaattattgcaaagtgtatattggttaaaaaaaaaaaggaggaagaggcagtttttcatgacggttaaaagtgcaggatttggagtcccatggtcctgggtgtgaatcctggctgtggcactaactatctgtgtgactggctgtgaacctctcgtgcctcactttcttcatctgcaaaatgggtagttgtatagcaaatgcacatagagaacacttaacactttggcacattggaagcactcagtaaatgttaattgttattattgttgctctaaagagatgaccccacaaggttatggagtatgtttacatcttcaaactattagttaagatatagccttaaacatatgctctccttatgtcagaatgttccctgagggttgaagtacaaccgggaagcttgattggttcgtgaatttaaacactcgtgactttattgcttactccagttttggttttggggttttagagagataatacatgggctgtctcttttcccctccctctctctgtttcctttggtgtgggaggaagaataatggtccccgaaggatgcccaggtcctaatacccagagcctgtgaatagctgatgttacttggcaaaaaggtaattaaagtcacaagtagaattaaggttgctaatcagctggccttaaaatagggagagtatcctgaattattcaggtgggcccaagataatcataatgtctttaaaagtggaagaggggctgggcacggtggctcacgcttgtaatctcagcactttaggaggccgaggtgggtggatcacgaggtcaagggttcgagaccagcctgaccaacatggtgaaaccctgtctctactaaacgaacgaacaaacaaacaaacaaaaaaccccacaaaaattagctgggcatggtggcacatgcctgcatgcctgcatgcctgcacacctgtaatcccagctactccggaggctgaggcaggagaatggcttgaacctgggaggtggaggttgcagtgagccaagatcgcgtcactgcactccagcctgggtgacagagcaagactccgtctcaaaaaaaaaaaaaaaaaggtggaagagggaagtagaagattcagtcagtgttggcgaaggagatgtgatgaaggcagagttaagggtgacgagatggctgatggtgaagatggaaatggtggacaagcccaggaatgtgagcagcctctgaaagctggaaaagtttggcaataaaacaaatcccccccaggacctccaacactttgattttagtacactgagtcccaagtcagatttctgaaatagagaacagtaagatagtacattcgtgttttgtgttattttgagccatgaaatgcatgtcactttgttacagtggcagtagaacatcgtagtgtctgtgtgtttgtgggggaaacatccagtaggaactctggtgatggatttttgctgaagatttgccaggtctgtcctgcagaccctggccgagcgtcggatgaagggagtactgacaacacaggcgtgcagtgtaagagcagctaggggtctgccggcacttagggccaaagaagagagcagctgcgaacagctgaagctgcttgcttttattcagtacagacataatgccgaaagcctggagcaaacacaatctgcgggtaattaacattattgttccccttttcagggagcagtcatgtgcacagattatcaaaggtcggtttctggacaacctaagtaaacaagcctgtttacgataaattcccctacacctccttgtacctactccttgccctctgcctcaggatcagagaacagctgccttcagcttattctcccctgaagctatgcagagccttctgaactttcagaaggtttgcatcctttccctatagtttctcccaccactctgaccaatctcctacaaagattaaatcaaggtgaatagaatgtgttttccatgtgatttataaaacatattttccatacacatacttagtctagatctttaattattagcgtaacagcaaagatggttatagttactatatttcataaaccctaaaaaggcaaattataggtggatttttaaattttcaaattaatatatatgatatacctcagaaaattatagaatttaaatcacatttaattaaacattttacaaataatttttacggagaagcataaaattacataaaaggaaggctgttcctgaagatccacggcacgtgggaaccatcattagggcaaatgtgaatatgtgtcttttatttacaaccaaagcctatttccctcctgatctcaccctttgtccacagctcgtctttcatccttaattattatttactacatagtctttgtgtcattactacaaagagacggtgctgtaactgggacgctggacacggtccctgcaatcttagtcccactgtacattctgttccatgtaagtgagctccaaatgacctcttggttcttcttactctgcagccacaaaaacatatccattttgctcctttctctttcttattttgtctatttctcccagtgcctctcctgaatacactaatatagcatcttctgtttttttctgaacccaacacgtttgatttcatttctgattaccatccctctaattataatttgtagcctttcttaaaagggaccctgtgggggtgggggggggcagtgggtgtggttgctcacacctgtaatcccagcactttgggaggccaaggcaggtggatcatctgaggtcaggagttcgagaccagcctgaccaacgtggagaaactctgtctctactaaaaaaaaaaaaaaaaaccacaattgtctgggcatggtggcgcatgcctgtaatcctagctacttgggaggccaaggcaggagaatcacttgaacccaggaggtggaggttgcggtgagccgagatcgtgccattgcactccagcctgggcaacacgagcaaaactctgtctcaaaaaaaaaaaaagaaaaaaaatggaatcctgggggtggactttggatatttcatcctatcagccttgtgtcctgttactcttgggatgggtcaaaaccaggaagtcccctgcagctttggcagcccacaattgctgatgaagccacaaattgttggaaacatgaatatccggcattcattgttttgagcctatgctcgccatgaatatgaactagttagaaatgagacctacactttcccaatgcttctccattcaagacctcttggctttatatctagtagagcagggctatactgtgccaatcttctagcaataaacttcacacaaatccaacagcctaattgttgtggttagaatgagaagagatgaagatgctgttgagttaggtcatctggtctccaaagcagaacttcacaaggtgatactttcttgtgaagtcacagtggtctatgtctgttcttaggctggtgggttattagtgcaccagaaccaaagggattctcaggagctgactcagagtaacctgacttttaagtgccagatgaaagagacagaatgcaaacttattaatttaacattgaaagatgatccattttgcaaccacagagttcccaactgcaaatcaatgcaccttctttgttgtacctaagaattagagaaaccaaattgtaatatgaaggcttttgtcaaaaatggaactagaagagggatatggggtcttgaggaatgaggttgaaaaactgcctcaagtccacacgtgcttagatggtgttcatgagttcagtgttgccccttcctggattgggctggacactgttgtgttgtgtttttagggctcactttctctttttaaaatattttcttaaccacttgaaccaccagggatatggctcaccttctttagacctccaagacaagcattatttctttaattctttatagctttcattaggctacatgtatgacattttcaaacttgagtaattatttaattgattgggcatttggaatagaggatttgagtttgttcagattttgactttaacatttactagctgtgacactgagcaaattacttaacttctgtaagccttagttcacttgttagtaatgtggtaataaccatagtatggtagggccattgtgagaattgagtgagataattcatgtaaagcatgtagcacaatgtctagaggcataatatttaatcagtttttaattgaatgaaagaagcattactctttctactttttggccctaggagacactgtggcttctgtgcatctgtgattacttttattatgtgttggcggtggagaagccttccagctgttttctccattgacaccataacctgactccaggaaacatcagggccacaagagacaagggtaacagatattgtactaggagaagggccatcagtcctctctgaattgccctgtcatttcagttgtccacaaaagtgatcctgttacagggatgacttcaaactgttctcccttctcctccagggctatcttcttcctactggccgcaaagattgtgaaggttgatacatgatggagaggtcctttacaactgagctccctaacattctggaaaacagaagagttggacctttatgtggtttttactttgggtcaggtgtgactcagctttcttttaaaaagaaaggttctatccttaatatagcactttcattagttatcagaatggctttgcatgactatgccattgtcatttggctcaagtgaaataattcattagctctcatgtgattgttttgccaactgaagtaagcttcacgaagcagtataatgcaatcctactaacaaggttactgggtgccaggcatgctctaggagctttgcatgcattaattaatgatgtcatctcagccctatgaagtagatgctattaatagccccattttaaagatgaggaaatagagagattaagtaacttgcccaagatctcatggtatgtggcagggctgggaatcagagacccagctggtctagattcaagtatgtgttattaatcagtacatgattctgctttttaaacaaaggtggccaaagttcttttctaggtttttctaatacctttaaaagggtgcttgttctgagatttcatcctagtctcctttccccactgaacttaacagagtcctcttacatgggtagtaattttatttaccttccactgtgagacttctccctgcaaccagagtctatgctgggagtggggaagggggtgtttcttagaaagtggcagtgaaggaagagaacacagttatttttttccggtcaatggaaaatgagctgacagacatttatcctccacagaagtgcagagagaagacctttttactcttacatacagttgatgggtagttctttatgaccagctacccatgtttagagatgttcagcccaaagcatggtctctctctaggtcttctgggtcagtagagttaggcagtttctttaagggccacagataccaaatgggtggatacaaccctttccaggaaactcttgagcactagcgtgcccagtggccctccataacgagctgtaatatcggaaatttttgcttctggattagcagaaaggcctttttgattcttttttgtttctgttttttttgtttgtttgtttttggagaaggaaaaagagaaaggagtcccaaacttgctctcctcctgaaaaaagtaagagatcttactgtctgagatgttttctccaggtacgactagtatgtccgccttgactattgggttgttccagagagagagaaagaggggggggggtgagagagagaaagagagagagagagagagagagagagaggatcaagaaaacatattcagaaattttgctattgtgatgccttcttaagatgtttagaaacattgatatacattttttcccatgtgcatgtaagtggtagcctgtggctcaaaagcatcacctaggaaagctctccaaatatgatgtttaacctgaaaggataattacagcaaacctttcaatgttgccaaacagggttgttcccatttgaactgggtgcgtgggttgttcccatgaaacttgtgaatcattcatgaacacactgatcagatatttctagccagcccaatacccagaggattcatttcctataaaagacatttgatcacagtgttgaaacaatgtattcaaggtttgcttgccctgagactaacccaagtctgtgtcacggatgctgattgcctcagcctagaaattcttcctaacctaataatgacctattctcttctctttggggacactttccttttctcttgaattttaatgtttccccccttctctcatttaaagtggatgtttgcttttaaaatgtgttttcattataaaaactttaattttaaatcaaaatggacagaaataggataaacttactcaggtaagggatccgtttctgtctagagtaagatacttttcttcattgtttgaaaaatggaaattatgggaattaataacaacatagagtcattatcttctaaagacatgaagatctcactgataccatccaattgcctttaaaagacactggcaaagtggggtggggggggttggaagactttttttggtgtcagttcttatttacagaggtagaaagctagacatgataagtaatgtcagagcttgtaagagaaactaaggacgtaagctttgaagagtccatggtgactgcccagagtctaagcacagagaagccaaatggtacttctgagagttagagcctgaggtcactgtcttggggtccagtgttcttcacattaggcctcagtccacacctgttcactacagatgtgcctgggaacgaggagagtgaggagcagaagacggggaacaaggagagtgaggagcagaagaaagagcactggtcctcttttcgacccacgtaccatggaccagttactgttctttctgtgccccagattctccatctctcacattaaaaatgctattagctgccatccaataccttccgcattcaaaaatccacatattctctgcatttctggatgagggataaagactccttggatgattctcactggaagctgtgatgagctggagaagggtgctttgaagagttgaaaagcaagctgttgctactacagattatttctgttcttgtatcaggtgctatttgacctttctaaggaaataaaagtactgataattcaatcccattattgtgcggcatggatgagtcagttaaattttctgcccagcagtttcctcatctgtgaaatggggctattaataatatctacttcatgatggggttgtgaggattaaatgagttgatgatatttattaaattattggtcattattgattaactccattttataaacaggcgaatagacacgaaggaggggggaatctgcatgtgtggttgtctatcaagctatgcccaaatctaaaagcctcaaataagtcatcaagtcattcagatctttaagccaaaagcccccatcagtgataaagcagtggcttttaattcagtgcacacacttcagctgagacttttgttaaaatttggattcccaggtcccacagctggagatgcagatacaggaggtctggggtaaggcccaggaatctgaatgatacagactcccctattaatgcaattgcaggtggcttctgggtcacactggagaagttttggcgggacgtcaggtaaggggttaccactaactgaactctggaggaaaagtttctgggtagtctcttctgatcagcaattgctggaattggctctgggaagtaaggatgcaaagggtgtgggctgtgtgatgggggcaggtgatgggggacagttaaggggtgagaggcaaggagaaagggggaagcgtggttacttacctctgtgtttggaagagtttaaactagctatgacatgaagtggagtcaacaagaagaaaggaaaaaaatctagaaaaaatatatctaaaatatctccctttttaagaaatataattatggaccctcagagtgagaagcagagatataggatttgacctcaggctctggacaccatgctgtgtttcctgattcatggttgtctttcgaactgtgctaaaattacactttccctccccacgagccccttttctgctctagctgctgacttatgctgaactgtcataaaaccttaaatttcctcctgtggctgtgtaggatacttatttagcctcctagtaaaaatccagtctccttattgcctttaaaagttttgaccacatgcatacaaccagcaaatggttttacattctcttatacgaagaagacacttaaaaaaaaaaacaaaactgcaagccttcgagtggctaactcccctctttactgtgcagcttataatcatatattttttaaaaccatgaatggcatgggggatattttgctctccataggaggaaggcatcctacttctaggataaactgaaaatggcactgctgcatcagttcaatcttagcttgagtccagtgagattcctcaaccctaattttgtagctcggagcagattttagtgtggatgatatatatcaaggtccacctgggcccagcactgaaccagaaagaaaggaagaaggtattgatggaaacgacatgtgtctaggtttaaatatagggaataggaatgcccttctgcaaagcaccttacagtttatgagaccctttcaccattattattccattttatccttgcagccgtgtggtaggcagggcttatattgttatatcctatttactcgaggtcatacatgcccaggctggattgagactccgtcccaaggtttctgaatcccagttccatgctctttccacattttcatcctgcagcctgagatagtacgcagttaactactgaccggaggtactctgcccactcagatgagagagaaattattgatttaaaagaggtcattctgggagttctgcattccacttgcctagtgtaagttgctacttgtctggaggaagtaaatcatcaagctgtaagttacacaatgcatgtgtctttgatgtgggcatcaggcattattgactcattgatatgcgatacataccctaagaactgaaaaatgctttattgagtagaattgtgggcctgatcacaggaaatcatgtttttttttctcctaaaagttaaacactattaaaactccaaaatcatgactggataactaaattcatgaagaaagaattttaaaatgagataattacaaaaataggtctagggctgtagctaaaagcaaaacttacataaaaattacattgggtggtgcttttcagcattcaaagcagtgtcacataaacaatttcatttgatcatcacaacaaccctgtgaagtaggcatgatcctcatttaacaaacacagaaattaaatttgatgaagtctaaatgttttccccaaggtcacagctgggaaatgcaggtgtaggacttcaggccttttgactacccatctgtgtttgattttgaattatttcttaaaacctctggcaatgtccaatgattattgtcaggaatgacttacatattctgagactatcctgtaagaagctgtgatgatggctggtatataaatgatgccttctcacattgggactgccttgcacttacaagcagcaattattcactattgcttttctgcaaaatgtgtggatattatgtccatttactctgatggatagattgaagcaggaatctaagctatgtttttctttgtcactcttcacagggaggggaagaagggttatttcttgagaattccagctaaatgttccttgtcaaacaatcagaacaaactcccattccctaaagaatagaaagagaaatagcaaatgtttaatgaaaagacccatgctatttcttcaaagtgttctagattcactccccacaacttatctgattctcaaataaaatatttggagagcctaataggtcacaaagttttggagaccatggacatttaaaaaaatatctttggaaaggtaaagtatgttagtatagataaatcataattaagacagcagagtttaataggatccatactcgtgactatctacacaagtgaattaaatattaaagatcttttcccctatttatactgttcccatatatgtttctttctgtatccaaagacatttagaagggaaggttgtagcttttcaccttcaggtgccggtggccaaaaacaaccctaaacttgtctgactggctctaaggaggaatgtcggtaaacaaggcctgagtaaacaagagagagacctgcccatcaatcacctgggtagtcaagcaatgtaggccatcttcctgggtgcttacaaatcagttcccatccctcagataaatgcaaaacatccttccagagaaatgtaatttattatcatgttagcagtggtgagttagggaaggagcagaataaaagatattctacctagcaatggggacccgctgtagtagtaagaaactaagtaccttaagggactggggagttttcttaaacctctctggcaggagcatgtattggcctctgtttcataaatgtgggtcattttcatcaccttgggatgttagactttggcaggtctgatgatgaaacaaggctgcacatgctcgtaagaagaaatgaccttcccatccttaatctccttggtgatggtgcaaattttaaccagtatccgggacaggggtccgcaggcactgcagtgctcctttaagctgcagggggatgaggatgtgcaagctggggccgtgctttctatggctccggacttacaagatgtccaaggggaaggctcacatttggtggcacgtgggtaacagggacgcctaaggaaaaaaaacacaattttagctgtgattgagggaaggcgatgatggtcatggagaaaaatgattgtggctaatttttttaacacgtgttgctcaagacaagtacatacttctaaatgcttattcatttattttgtactgtagttactggaagaaaaagaatcagattaaatccattggaaatcagcatcctaggtttagaagtattcgattatgtaagtttccattagtcaataccatcacattgtggaaagaatactgcactagcagtcaaaagactgaggcagagaccagctctgtcctttaccagctggtgacctcagctaagtcatttaacgcactcaacctttagtttttcatctgcagaatggatataatggaaactaaacccacaggatcaacagtgataaggaacaagttgagggcattattatccgaggaatggaaattaaccagatatttttctcattgaggagttagtcatactaatagtggtggcctgaaccccagctatgaaagagtcctcactgtgtcatcaggaagcttcaaagtgccttctggctgtctatgcatagtttttagagaactgaagtaaaaagcagttcatagtaaacactctttttataaacataatctttctttgatgattcgaggtattttggtatatgatcacagctcctaaaggtgacagcattgatgaccattgtgctcacataatgtggtcatgccaattaaaagaatgctgtgaagagttcactgattattttcgggaagtaggtctcctttgcaattgtaactaagtctctggggttttagtttggactgagttgcttcaaagaactcatcctccatatatgtttacttatgggttggttagcttcttattgcttacaaaaattataacttttattttttaaaaaagatgctaaaacatacatgtgtacatgcttctgttggcctcaaggactagtggctagatagggttaggggtttcagcctgagcagaatgttcctccaaaggagcctgggttgttttgtacaagctcatgaaaatcagacgttcatctcagtggggaaacatctgtaatggtcaccaggaatattcatctatggggaaataattttttctctagtaatttttaaaactctaagaaggtaagcaacctataagaaattaacctggcccatgggctcttcagaacagctcaggtcagccaatgcctcaaatttggataaggttacaattgcaagtcttcctcatggcacagcttgagagggtgtgtggatgcctctgtccaagctccccatcactggcaagaaggtcaaacaaagcacttgacccctgttgccagtggcagtacatatatctgcgttcatttacacttttttgtcatagaagttgctgttattttacatacttgccatccgagctctccagaaggctgcggtatgtggtaatctcacattccagccgggacttgacgtccagcaggatctcgtattcttggttctgtctttccagggcacaccggatctctgccagctgagcttccaggttatcaatcagactctggatctgggtcagcaaggccgtgtagcgagcctctgtctccgttaggatgcactcttgggaatctctctaccatggagaaggatagtaggatttataatgactcctttaagcccaggtcacctgtgacctgtatcatttaaaaaaaatggtttctttgtgacactactgatagatctccaagcactttatttattgtttcctaatcaaataaatccaaaacccaaatgatcaactatgctaaaatctgctttcctttatctcttccctctttctctctttctctttttgcttctctgtaagtatttgtttcactttctctttcttgaccaaccaatagtctcgcaccacactttcctacttaggagagaaaaaataataacttaatgcacacccaggcattaaaaatgcattactggctgggcgcagtggctcacgcctataatcccagcactttgggaggcccaggtgggtggatcacaaggtcaggagttcaagaccagcctggccaagatggtgaaaccccgtctctactaaaaatacaaaaaattagctgggtgttctggtgggcacctgtaatcccagctacttgggaggctaaggcagagaattgcttgaacccgggaggtggaggttgcagtgacccgagatcgtgccactgctgtccagtctgggcgacagagtgagactccatctcaaaaagaaaaaaaaaaaaaagcattaccatggcacttcattcagtgagtgttcgtgtcttaaaaaaggaaggaagcaatgttttaccatatacaatttatccaccagatcaattcctttatatgtaaaatatgaaagttgaaactgatgagtaaatttcattcctgctctatcattctgtaagtctatggataatgatgggattttaggttttaatagcctattatttgcatgattatcccaatttttatagatgagaaaactgaggttcaagtggttcaatatgttgtccaaggtcacatgactagctggtgacaaaaccagtgtggggcaaggtcttcccaaaagccttcacatcagagcatgtaagcaattctctacttcagagaggcattatcatgagacagaatgatactggctttggaatctaaactctggctcagactcttatttcttttgtgactttggatgagtttcttaatgtctcaggatctcagtgtctctataaaataggtgggctgaaacttaccttggatttgcttgggaaaatcactttagctcttggagcctcatctgtaacattcgttaataattatgccaccccccctcttaggattgctttataaatctcatgtgatagcttgtaaaaatgctttgcatataataaaatgctctcccagtgtttcccaaagtgtacttcatgaatcattaataccatgagatgttctaaaaaaagtggggggatccacagtcaaataagttttggaatgctgaataccatatacccccttcctggagattcatggtgtatattagcttattaatggctcacaggaaggcaccctgtttaaccttggtttagtgcagcgtttcgtagacttatttggccacaaagctctttttcagccatagacgctttaacaaatgaggaactattgttctgaaagacacagtttgggaaatactgcagcacacaggtgtaagggactgtttccatctttgctgagctaggcttggtcagcttgctcagtaccattcgatgctgggcctgcagttcaacctccagagtgttcacactgcgtctcagttctatgatctccttttggcagcattgctgctgttgagagctggtcaccacttgttgattcagctcctctatctgaaacacacagccagagactgagaatattatgggaggaaaacatgactttgattaaagggccctagaaatgcagcatcagcttattgtttttgacttttctatatcccccacctgcgtgttgaaccactgttccacatctttgcggtttgtctccatgatgggctcatattgacatctcatttcttgtagaacctggtttaggtcagcagaaggggcagcagtcacttcaatgtcaagtctctccccaagctgacactgtaaagaattgatttcctaaggaaagaaaaagactgtgaagtcacttggtgaacagataacccctttgtgttcttgtttcactctaactgctacgatttagcttaattgtgtctaaaatatagcccacaacaaaggaatacatgatttacaggtgttattgagatgctataaaatgatttaagactctttcaggtaggactgtgtgtttaaatgtgtgcaaaattaaaaaaaaatgagtagcaagaccagagttccaaaaaatttagatcatttccagggctggataatgggtgaaacaggataaaggtggaattgatcatgagagattatagtctctatggtgcaaatacgggattgtgccaatattgacttgcaccaatattgacttgtaccaatgggaggtggcagaagcctgtatagggatgcctacaaacatgggaagactgtaaggacagaaaaattgggttccttcttgtagaaaagctggaggggatgttggaggcctttcttccccttatggctccagatattgtgttggagccagtggatttgaaatactaccttgaaccagtgctagtagcagtaggtattttcagggctaaaccagagtagtacgtagcagtggtttggctctgtgtccccacccaaatctcatctcgaattgtaattcccataattcccatgtgtcaagggagggacctagtgggaggagattggatcatgggggtggtgtcccccatgctgttcttaggatagtgagtgagttctcacaagatctgatagttttataaagggctcttccccctttggtctctctctgtctcctgctgccaagtgagatgtgcctgcttccccttaagccatgattgtaagtttcctgaggcctccccagccatgtggaactgtgactcagttacacttctgtcctttataaattacctactctcagttatttctttatagcagtgtgagaacgaactaatacaagcgggcacaccctttgtcaggtgcaactcaaaggaactgatgctacttttagggacttagcttgtgattactctattggtctttgtctcacctctttgtggttgttcttgaggcaaaggagctcctctttcagagactggacttgtgcctctaggtcggccttgcccagggtcagcacattcaggatctgcttgaggccattggcatctgactctaccagctggcgtagagacacctcagcttcgtatctttaaaaaccagatgggaaaagagagacatctgaaaggagatgatgcaaaccaagccaagcagaactctcatctgcattttgctctgggcacctcacttagtgtatttctattagaagttttattctctttggaggtgaaaccatttgatatagatcataacttaattattattcccaaattagtttgctagggggatctacattgctgttctttgagatatgggaatttattgtccttcctctgcccctagtggcaatgcaatgtaagtgaagaaagcactggattagggctcagaaaacatgtgtccaagtttcggttttgacttgtgctagttatgcttacctttgggtgagtaacttagcctcactaagccacagatttctcaccttaaagagagtaacaatatattagtcctatctattttactgaactattgtgtaggtaatcaaatgggttcacaagttagaaactataggtactgtatacatgtgagcagttattaatcttaatcattcattgaatttgaaagtcttttctgggcttgtgccaacatcatctggggcaagagggttagtagacatggggacaattttgttgagggcatctcggtcagactcagggtgagctctgtcattgatgacggtgttgggtgggcttacttggctctcaagtcatctgcagtcagtttggtgttgtcaatttgcgagaccagtctggaattctcggccttggtacacaagatctagaattaagagattgtacacacaaatgaagcaaacaccaagatttccttctttaagaaccaaggggtttgtgtgtgtgtcaagtaacaggggaaggctaagtagactttttattaatcttcatagctatgctcacaaagcttggaaaacttcagaaagtcagatttcctgttattttcctaaaagatcagcaaaaagtacttaactagaaacttttaagtattttttttgttgttgttgttaaaaaatccaggctgagagcagtggctcacccatgtaatatcagcacttgggaggctgaggcgggcggatcacgaggtcaagagatcaagaccatcctggccaacatggtgaaaccctgtctctactaaaaaatacaaaaattggccgggcgcagtggctcacgcctgtaatcccagcactttgggaggccgaggcgggtagatcacgaggtcaggagatcaagaccatcctggctaacacggtgaaaccccgtctctactaaaaatataaaaaaaaaaaaaattagctgggcgtggtggcgggcgcctgtagtcccagctacttgggaggctgaggcaggagaatggcatgaacccaggaagcggagctagcagtgagccgagatcgcgccactgcactgcagcctgggagacagagcgagactccgtctcaaaaaaaaaaaaaaatacaaaaattatctgggtgtggtggtgcgtgcctgtagacccagctactagagaggcagaggagggagaatcgcttgaacctgggagctggaggttgcagtgagcagagatcgcgccattgcactccagcctggtgacagagtgagactccatctcaataaatacataaataaataaataaaaaataaaataaaatccatcctaaatttatataaataccatgatccactagaatgtcaactccatgagggcagggactttttaaaggtcaccaatattttcccagaatctagaacaatgtttggcccaatgttgttgctgctcagtaaacatttgttgaatgaataaaactgaataaatccagatatgtagtagcagaatacgtctgtgcataacaaacttaggtttggtgtagaaacaaaccaagcaatgtggagatgataacataagcataaaaggagaaaaaggtggtgatggttgaaaaatggataaaaactaaattgcttagaaactcattaaagcaaaatttattttctctgatctctgtttccctatttttatttaaaaaatggcaacaacttgctgttaacatcttttggtcctgagtcatctagttataatggtagagtgtatttctggagaaaggaaacaccatgagactcttctttttgtttctgatttttaaagacatagtctcacttttgtctgggctggagtgcagtggcaggatcttggctcatggcagcctcaacctcttgggctcaagtgatcctcccacctcagcctcccaagtagctgggaccacaggcatgtgccaccacgcccatctaatttttttttgtgtgtgtatgtgtgtgtgtgtgtgtgtgtgtgtaaggatggaatttcatcatgttgcccaggatggtctagaactcctgggctcaagtgatctgtctgcctcagcctcccaaagtgttaggattacaggtgtgcatcactgcgcctgaccagaaatactatcagactctgaatgctgcctcaagatgacaatttcactcaagaaatttttctattcttcaaaaaaattttcagcatcaactgaacaaaaaatattaaagtttagcaaataactgttgcttggaaaccattaattcacaacacgattaaacaggttcttaggaatcttaccttctgctggagctcctcaatggtagtgtagtaagacaggtaatcaggacatagaacagggagctctttgttactttcttcctggattttagattccagttcagcattctctcgttctagcattcgcaccttttgcaggtagttagcaaggcgctcgttcaagatttgcatggtctccttctcattactgttgatgccttcaccataccagctgcagtcatccagagaaaaacgggcattgaagttgttcattaggtagatgggcttgcgacaaaagcgaggagtgggttggcagccctggtcccagggaattctgagaacgtggccagctggttgacagttgttgactgtaaggccaccaggatggcagccgttgttagaagagatggtactaacatttgtaatcctagagcagttttgacatggggttgaaggagaattggttgttgtacagcccttggtgtccatagtatgtgtctggctttagtttgttccaggtctgtggtcaccaggatgaaaagctcaagccacctccacagagtctgaattccaaggctcttggtgttttcctctttgaagtgcttatatagcctctcttctacgtggtgtcacacaggtgggatgttttcctttctcaggtttatatcaaatcctgtaggaacatcttattagtctgctttttacttgcttaagaagagttatttgtctcataaacatgtgcatttaggctgttagtaagttattacccatcataactactacttgtctattggacccagagcttcaaattatgtcttcaaaaggaactgtcctaacagcatccattattaagcaggtgtgagtatactaagttcattacattcttgttgacctctccacttggcactgagcttaaccaggaatgagttcatccttcttttcctttcttctctagaaaagggaaactattaatgtttaataattattggtaaacttagaaatcagaagtcaatattttagtttgttctgcccaaatggtttccccattttcagtgtcaggacaatgtgagtatgaattaaaatgttagtcttttaaaagtcttgttttaaagataattgctagatttatgttttagctttccataaaatgtaataacataaaataaaatataaataaaatatgaaataaaataaaagccatggggaaaaggtagggtttgattgctaataagaaatttcttggaaaagagactagctctcttttggttttccaaagtccacattttataacatttttagtgcttggtgtttgcttgtggtattacattagataaaaatgtatcacagtgttggtttatactggatgtttaaataggattcattgaaaggggtgtgttttctttctgaggaatacttactcagcattttcttcagaaagttacttgctgctaatcctttatggaggctctaggggaacatcattttcttgccttttccagcttctacaggctgtccacatcctcagctagtggccccttttcatccttttttttttttcttgaattatgagattttttgtactttgagttctgggatacatgtgcagaacgtgcaggtttgctacataggtatacaagtgccatggtggtttgctgtacccatcaacctgtcatctacattaggtatttctcctaatgctatcccacccctagcccctcaccccctcacagtccccggtgtgatgttcccctccctgtgtccatgtgtgctcattgttcaactcccacttatgagtgagaacatgcagtgtttggttttctgttcctgtgtgagtttgctgagaatgatggtttccagctttattcatgtccctgcaaaggacatgaactaatcctttattatggctgtatagtattccatggtgtatatgtgccacattttctttatccagtccatcattgatgggcatttgggttggttccatgtctttgctattgtgaatagtgctgcaataaacatacatgtgcatgtgtctttatagtagaatgatttataatcctttgggtatgtatcaagtaataggattgctgggtcaaactgtatttatggttcttgatccttaagaaattgccacactgtcttctgcattggttgaactaatttacactcccaccaactgtgtaaaagtgttccaatttctctccatcctctccagcatctgttgtttcctgactttttaatgattgtcattctaactggtgtgagatggtatctcattgtggtttgatttgcatttctctagtgaccagtgatgatgagcttttttcatatgtttgttggccacataaatgtcttcttttgagaagtgtctttctatatccttagcccatttttttgatggggttgtttgttttttcttgtaaatttgtttaagttccttgtagattctgtatattagccctttgtcagatggacagattgcaaaaattttctcccattctgtaggaggctgaggcagaagaattacttgaacccaggagttcaagttcaggtgggcaacacagtgcgatttcatttttaataaaataaaataaaatacaaaataaaagccatggggaaaaggtagaccgttatatgtattatatgtactttggggacaattttgtattccctttggtgtgggggcagggaatgttgaaaccatacttcatcctttacagtgggacgaattacaagtagatcaaagattgagatatgaaaaataaataataaatatgcccaaaaggataattattttataaatttggagtcagaagacttttccaatgatgactcaaaattaagaagccgtaaaaaactgttagatttgactccataaaataacagtgtttgaacttgtgcttgggtgaaaaatacaacctgtaaaaccagaagacaagatgacaaactgggaaacaatattacaattacactctagacagtgaccaaaaggaaaatacaaaaggcacttaaaataagaaaaaatgctcaatgtcactcatgaaaagagaaatgtaaatttaaattatactgagatattttagttttccacctatcaaactgaaaaaaatcaaagtttgataacagatacattcactgcctatagcactctcattgcttgtggcaatgaaatgtaaattcatgcaagttactataatgctactacaattaaaacagtgtgatattggcataagggttggaaagtagatcaatgagaaagaatatagagtttagaaatagactcacatatatgtggtcaattgatttctgacaaagatcccaaagcaagtcaatgagaaaaggaaagctttttcaatactgttttttcaatactgttcaatacttgtcgctgaatcaagtggatacttgtatagccaaaatgaatacatcttgatctctacctcacgctacgtataaaacttaattcaggttggattaaacacttaattgtgaagatttcaagtctaaagtttttagaagaaaactcagaagattatattcataaccttctgccatgagaagacttctaagctcatggaggacactataataaatagattagacttcatcaaaatgaaaaccttttgttgatcagataaatagctaagaaagtgaaaaggcaagctacagcctgggttaaaatattctctctctctcttcatacacccaccccccaacgcacacattagaacacatacatacacaacgtcatatcttttgtaacaatgggaatatattctgagaaattcacctttagtgattttgttgttgtgtaaacatcacagtggacttcatgaacctggatggtatagcctataacacacttaggctatatggtatagtctattgctcataggctgtaaacctgcacagcatgttactgtactgaatacagtaggcaactgtaacacaatggtaagtatttgttatctggaaacacatttaaacatagaaaaggtacaataaaaatatgacattatagttttttgggacagcttttgtatgtgtatgttccatcattgttgactgaaatgtcattatgtggcacatgactctataaataaatatgtgtataaaaataaataaacacatatttatttatacagtaatatactatctctctctctctctctctctctctctgacaaaggacctcccccaaggacctagcaatttcatggttaggtatatgtccaagagagatgaatgtatatattttatacacacaataatatttgcacaagaatgcttatagcagctatattcttaatagcactaaaataaaaataactgctcataaacagaataatggacaacaaactgtgacatgtttatgtaatggagtagtatgcaacaacaataaagaatgaactgccggtactcatgacaccatggaaaaatctcaaaaacatattgagctgaagaagtcaggcacaaaacagtacgaacagtatgactacatttatattaacttcaagaacaggcaaaactcatctttgacatggttagagataagagtagtggttgtctctgtcagagagatgtactggctggaaagcaacaagaaagaatttctaaggttgatgttctacattttgaaatgctattctgtatcttgatctgggtgttgattacacaaattcatgtgctttcaaactccatgaagctgcctacttttatttttatttttagacacagggtctcactctattgcccaggctggagtttagtagcatgatcatagctcactgaagccttgaattactgggctcaagttgtcttcccacctcagcttcccaagtagctgggactacaggcacatgccaccatgcctggctaatttaaaaaaatttttttagagatggggcctcattatgttgcccaggctggcataaactcctaacctcaactgatcctcccaccttggcctcccaaagcactgggattacaagcgtgagccactgtgcccagcctgacctgcgcactttcaattgatgcatcttattgtctgaaaattgtatctcaataaagtggagttaacataaaaagttaagatttgatacaactgtgcagctgcatgaatgttcactactttatctatatacttaaattacaaatggatcaaagattcaaatgtgaaaagtgaaaatcataaatgtactaaaataaaatataggagaatacttttacaaattcagatgaggaaggcctttgtaacagtgacttgaaattaagaacctgtaaaaaatacgataaatttgacttcataaaatagcagtgtttgaaatagtccattagtttgaaaatgtatgaaaaatactgaaagtaaataaatcaagaggttagcagtgaaattctttgcattttatagttactgatgaatattattttcttgtttttattccacaaattccacaaattgaatgtatctcttttagaatcattagaaaaattgtctgcaaaactgtttctgcttcgttagtttcttagactttttttctgcctccatacctttctaataatttttattcttttcctcttgtgtctcacatgcagagttgttccttccttggctgattcccttttgatttcttcagggccacatttcatccattatgctcccccttttcttgcctctttcatgtcttctttactactggatcattttttctttccctataagcacatctgttaactgatcctacaatgtctgacccgtaaccatgaggcacttcttccatgaaggtggcttctgccttcttttcattaccaaaccttttgacagaatagtgggtacttattgtctttatttttctaccaccaggtcatttgttaacttttgtcaatctggctagcctgtaaattactttaccacattctccactttggagatcttctttatctaccttcatatagctccattgctggtgcagaaatgttcaaccttcctacagacagagcaaggctcaaattcttgtttgcctggcaaccaagaccctccacaatattgacccagctgactttatctcatattccaggacccccgacccactctatacattctagcccaactgcatcctttgctattccccaagctcttcctgccctgttcccccactgcacatttattgtgggggttccctctacctttcttcatctgtgtgtttcaaggctgttctggaagagactcgggctcacgcatatctggttctcctctccttttgggcacatgggaggcttaccctctcttgcccctttgcagttaggcagggtattaccaaggctttgttttctggttcaagatctttgggctgtctcttccctgccccaggcactgagaaggcagctgttctagaagtgcttctctcttctcttttctttttttgagtgtcattttggagaatctcagctgtaaaaactcaagtccacactgcctggaagatcgaatctggaagtgatagaaagttctcttgacagctttgcccctgtctttctgagaaaggggttgtgcacaacataggaagaatgggcactggggccagcctgagaccagtagctgagtgataggaaggccttatctgcctctgtagagccagtgaggaatccatgaattgtaaatattaaatttacatagattaaatatttaaaatattaaatctaatattgtaaatattagatttctgaatcgtgggcacttttttttttttttttttgagacggagtctcactctgtcgcccaggctggagtgcagtggcgcgatctcagcttactgcaacctccacctcctgggttcaagcaattctcctgcctcagcctcccaagtagctgggattacatgcgtgcaccactatgcctggttaatttttgtatttttagtggagacggggtttcaccatgttggccaggctggtctcaaactcctgacctcatgatctgcctgcctcagcctcccaaagtgctggggttagaggtgtgtgccaccgcacctggccacatatatgttttcttcacatgggtggtgcaatcaaaatatggaactattcaatcaccacagagctttcctttgtcctatgcctaatttgttctccattcttataattgtgtcatttcaagaatgttatatacatagaattatcaaatatatggccctttgaattgccctttttcactcggcatgatggccttgagatctttaggacatttctgtgatctctagtttttggctattacaaacaaagctgctatgaacaattgtgcatctcttcaatccttttactttcaacctacctatattgttatatttagctttttgcagaatgtatcgtacagttggatcatgcttttttatccactctgccaagatctgtcttttttctatgtctttagactctttccacttgctgtaattttctatatttagcctgtattgtatttattgtattctgtttgttcattctgttttttgtttgtttctctgtattctttttcctgcctttctgtgggttacttgaatatgctttagagttccattttgatttatctatagtgttttttagtatacctattggcatagctttttaaatagttgctctgggtatttcatgctgtatgcatagcttaccatagtctaccagtgttaacgttttatcagtttaagtgaagtgtggaaaactcgcctttgtttatattcctttactcgcctccattttaatataattgtcttaaatattttctacacatatattgagaaccacatcagacagtgttatacttcttgcctcaaccatgaaacataatttagaaaactcaggaggagaaagaaatttatttaaattaatcatatattaattttttattatattttttcctgtctgatcttccaagtttccttattttatagttttgtttgtgtttagggaattttctttagtcattgttttaggttggtttgctggccacatcttttaagtttccttcatctgagaatgtcttgatttctctttggttttctgaacgatattttcaaagggtatataaatctgggttgacagtttctttctctctttctttctttctttctttcttccttccttcctttccttcttcttttccttccttccttccctccctcccttccttcattccttccttcctttccttcttcttttccttccttccttcccttcctccctccctccctccttccttcgttccgtccctccctccctcctttcttttcttcttttcttttctcttttctttttccttctttctttccttccttccttctcttctcttctttctctttctttctttctctctctctctttgtttctctttcctttccttccctccctccctctctccctcccttccttcctttttcttttttgtcttgctctgtcacccaggctggagtgcagtggcacgatctctgctcactgcaacctccgcctcccgggttcaagcaattctcctgcctcagtctcccgagtagctgggattacaggtgcccgccaccgcacccagcaaatttttgtattttcagtagagatggggtttcaccatgttggccaggatggtctcgatctcttgaccttgtaatccatcctccttggcctcccaaagtgctgggattacaggtgtgagtcaccacgcctggccgacagtttttttttttcttttagcatttgaaaactattgtattacttcatattggcttccatggtttatggtgacatacctgccatcaattaaattgttttcttctattggtaaggtgtcatttctctctcactgctttcataattttttttgtctttagctttcaaaagtttgaatatgatatttcctggtgtagatttcttagggtttatcatttttggggtttgcttggtttctggaatctgtaggtttttgtcttttgccatatttgtaaattttcagtgtttattccttcaaatgtttttggcttcactttttctcctcccttacagaactccactgacatgaatgttagatcgtttgatatagccccaaaattccctgagactctatctttttaacactattttttttccgtttttcaggtcggatgatgtctattattgtatcatcaaattccctgatgttttcctctctggcctgcattctgctgttaagcccatctccattgaggtttctattttggttctatggtatgtttcagttctgaaatttccactggagtctttccatcttcttcattgagtcttctctatttttgcatttgttgtaagagtttattgaagcattgcttactgaagcatttttatgatgactatttaaaaatcattgtcaataagtaaaatagtgtaactggatgtttgtaacaccaaagatacatgcttgaggggatggacaccccattctccatgtgattattacacattgcatgcctgtgtcaaatcatctcatgtaccccataaatatatacatctatgtacccagaaaaataacaaataaaaagttaaaaacccttgtcagttaattctaacgtctttttcctcttgatgtttgaatttgttgatcatcttttttcctgtaagttgagattttatgatccttggtataaagagcaattgttgattgaaacctggacattggggcattatgttatgagattcaggatactgtttaatcttatgttctagcaggtctcctctgacactgttttggcaggggaagggggacactgcttcattcctaccaggtgggagtagaaatacaggttctctccactttgcccctattgacacccaaggggagagcccccctcatcactgctgggagggaggattttagactccttacctggcctctgctgataccaccctggccaggaggggcaggaatatcttgttattgctcccatgcagcttccactgacactgcatgggggtggccttggtactgctggaggagggaaagagttctgactgtccagtaggactcttgtgacactaaccccagaggagaaaagaagagcctcactgcagcctgtagagttaagtccaggcttcccgtgtggtctccactgataccatgatggtgggacagggagtgcttccatgtctcatagtaggaatgaaagtcctggatctctcacttagccttccctgattccaccccagtggtgaagtttgagtgccttattacagcctgggaaggatagaagtctggactccccacctggcctttccttgtgtggatatgggtgggtgaaatgatattttctgtggtgtttggctgagttgagtggttattgtctaaaggttttccgcctttctaggctgcctcttttctggttctttaagcagagcaagctctttctgtttgtttgtttgtttgttttgtctgcacctgttggtgtttctggttgttggtttctccagctccccctctgggatatatgagataaaaagctaatccagggagctcaccacagtgtcactcctggagtctcaacatctttaggtggtttggcttcttcttctacctttcagagtcctcttatgtttatttgatatgtaatttccagggtttttaggaggaggaatatggaaatatacatcattctggaagttctctaccttgttttttaaatatatgagaataattattcttataacctaaatgtccaataacagatcaatgtaccttatggtacattatgcaaccagtaaaatgatggctacaggctgggtgcagtggctcacacctgtaatcccagcactttgggaggctgaagctggtggatcacaaggtcaagagattgagaccatcctggctaacacggtgaaaccctgtctctactaaaaaaaaaaaaaaattagcctggtgtggtggcagacacctgtagtcccagctacttgggaggctgaggcaggagaatcgcttgaacccaggaggcagaggttgcagtgagcccagatagtgtgactacactccagcctgggtgacacagcaagactctgtctcaaaaaaaaaataaaaaataaaaaaagtgatggctacaatacaatcttatgtttttattagaattaaaaatgcttagatgacataaatgaaagaaagtttacacaagtgtgtgcatatgttagtatgattatagctgtgtggaaaaatctattataagaaagaaaactggaagaaagtaccccaaaatattgactatggctgtttggaagatgaaatcataagtgaccttttcccttttaatgagccaaatttaaaaaaagagaatctagtacttttataatcaaaaaatacattttatcatattttattcctaatatttttcctcagaaagatacacacaactattttctaagatatatgacatttctcatgggttcattaatttatttgtatttgaggagttaaaaaatattttcagcctgggtttatgtacattgaaactatggttatgggtttagatgatttccttgccataaaatgaatattctatcaacagtaatcagccatagagctatatttaccacgctaaaggaataaaacacgttttatttggagatgagcaagaatgctttatgggcttccagtataccacaaataagccggaaggagaggaaatagtaaagcagaaagactgaggatacctggagggcaattccaggatatgagagcctcctggatttgtgcttccggtttggatgtccctggttgaagccccatctcctttctaggatgctgctggctttgattcctctacctgctgtccttaacattcacaagcagcagttttcaacagtgcagatgacataggctgagcatggctcacaagtgttgctcgaggtgcatgtggtcgaacatgggctacaggaaagcctggggaaaaatcgattttcaaccaagattaacaagggaatgttgataaaatggcaactcagaaaaaccgtgtcaaaatttgccctacaaattatgttctgaaaaaaactctgcacaatagcattgactgaagcctgtttcttctctgcacccagaattgccacttcatgttcactgtagcagtggcagttgaatagtattttatattttttcttgattttgcaaatgttatcttaggcctattcctgattttcctttagtggaaaacaggaacaaagggagatgccagcatgaaatgttacactaataattaatctgcctttagaatattttaaaaatatctctagtgtcatgttcttaacctcagccacttttcagcacttttttaagaagatccctaaacacactggggaggtctgaacttgtccagactttggggaaacaggattcttttacatcagcctctttgtgactctgggggatttcatgagtaactgtggaacttgcctgctgtcctcgctgtccagcaggccccagtacgtgttgatctcaccctccagccgggccttcacgtccaggagcacctggtactcctggttctgtcgctccaggtcgcagcggatctcggccagctggttctccaggttatcgatcagacactgaatttgggccagctgggagctgtactgggcctcggtttctgccacggtgcattccagagattctgtctgcgggaggaaacattgtccaaaggaccatgaagtgcagtctctcgggccagagtgcctactttcaaattcctgcttacccttttctagctatgtgaccactggcaaattatttagcttctgtgagtctcagttttattctctgtatagtggagaatacaaagtatctgtttcattagacggttgtgaagattaagagttaatatgcgggctgggcgcggtggctcaggcctgtaatcccagcactttgggaggccgaggcgggcggatcacaaggtcagaagatcgagaccatcctggctaacacggtgaaaccccgtctctactaaaaatataaaaaattagctgggtacggtggtggacgcctgtagtcccagctactcaggagaatggtgtgaacccgggaggcaaagcttgcagtaagtcaagatcatgccattgcactccagcctgggcgacagagggagactccgtccaaaaaaaaaaaaaaagagttaatgtgcgtaaagcatttagaacagtgccagccatactgccactgttctacgtgtcaactatcactaccaccactatgactacagcaatacatgacatatttgtgaagcttaaggactatccacaacatatgagaggaaagattgagtttgggctcttggcagggaggggtagtatagtgctattaagagaagaggctctggataccagaggctgggactggcatatgtgtggtaaggggatgaagagaggttggttaatgggtgcaaacatacagttagacagaaagaatatgttttcatgttggacagcagagaagtgtgactacagttaacaacaatacactgtgcatttcaaaatagctagatgggaggacttgaaatgctcccaacacatagaaatgataaatacttgaggtgatggatgctctaaatatcctgacttgatcattacacattctatgcatgtaacaaaatatcacatctacgtaaaaaaaatttacgcatattatatatcaataaaaataaatttaaaaagagagagagaagagactctgggattcaactggctgaactcagcttccaagtttgcctcttagaattgcatcctttgcaagttacttaatctgagtctcagttttccttatctgtgtcatgggataaaggtatctatccggtaaagttactgtgagccttaaatcagcatagtgcctctcacaggatgaatgctcagctattgttcttctaggtgttctccgcagggcctaatgacatgcacacagtggtgcttgaccagaactggttcatgtcatcttgaacgcatggtgttcctgttgcttgagtggggggtggtgcagtgaaggataaggttgaagtgtagatcctgggaaactgtaggatgaaatgtttgaaaatgattctttgttttagatataacagtgagcctggaaaactggcctgaatcaaatgagaattaaaacctgccagaatgcttaagcgaccatggcccggaggtttctctccagctctgcttctccctccctgtctctggaggctgctgcagcatcagactcaagcccaggagtgaaggtaaggcatcttagaggacaagctgtggacctgtcacttctgcttctattaatagctgggtaaacggcagtactcgggaaaggcaaggaaatgtgatcctcggatatggaagagggcttaacatctcagggcctgacttatcagtgacacaacggacactgcctttgcctcacgcaccaggctttgctgtgcttggagctcaatttccagagcactggctgtgcgtttcagttccaagatctccatctggcagccctgcagctgctccgcgctggacagttgctgctgattcagctcttctgtctgaaacacagacaccattagagaattcaaaaaaggcagaagtctgtaagcctgacattttttcaatctgggtactgacctgaacagccaaccattcttcagcttctctgcgattgttggcaagcaccgtttcacactgacagcgcatctcatccaggaccctgttgaggtcaagggtgggggcagtgtccagctccacactgaggcggtcgccaagctgttcacgaagcaagttgacttcctgaaagtgggatggtgtaaagaatgtcacagaatggtggggaaaaatccatttgacatccaatggcattctacttctgttttttggagcagtgggtaaaagtgtgagattttgattcagattgcctgggctgaatctcttttcaccacttagaagggcctcagtttcttcgtctgtaaaatggacataataattggacatttttccagaaagttattgtgagatctagaagagtcaatctacacataattaacttataaaagttaattatgacacatagtaaggtgtcaataaatgttagctatgattgtcatcaacaaacgttcaaagagcaaatgtactttgttacatcattcagcttttcattttctagctttatcaatatatcagtggctgtatattttatgatttttagaagtttataaatgcggaatatttaaaaacactggtccagatagtgcacagtctttatcccttttttgaaatggacttcacagtctgttcctcagcctgattttcataccctgtggactggagctaggggtggcataaagcctccaaaggaagccatttgtgaagttacctcctccacaaaggcaagggcaggagaagagtttgattccttcctctggcgctgtctaggggttatttcacaccttaaatcagagacacactggaatgatcaggttgaatagtaataatgcctcgagtagtttttgtttgtttgtttgtttgtttgttttttgagatggagtctcgccctgtcacccaggctggagtgcagtggtaagatctcggctcactgcaacctccgcctcctgagttcaagtgattctcctgcctcagcctcccgagtagctaggactacaggcgcctgccaccatgcccagctaatttttgtatttttagtagagatgaggtttcatcatattggtcaggctggtctcgaactcctgaccttgtgatcctcctgcctcagcctcccaaagtgcttggattacaggtgtgagccaccatgcctggccctgcctcaagtagttttattccagcttaaacaacatctgcccaaattcgatttacaaacatcaacagatcatctgtcaatgtaagtacgttactctcggagtccttcagcggagttgccactttccttacctcttcatggtttttcttaaggcaaaggagatcttccttcagagactccacatgggcctccagatcagatttgcacagggtcagttcctccaggatcccatgcaggctgctgatgtcagcctctaacagctggcgaagggacagttcactctcgtacctttcacagcaaaagagaaatccaacgcttactttgctgaacgctgtgcaaagtgtggggatacatggaggatcgacacacggacttcaggaagccatgtgcataatttctcttaattcctaagtaatgataaattcaagcttttaaaacattcttaactttaaaatattatatagagaatatttgtgtgtgtgtgtgtgtgtgagagagagagattgagagagagagagccataagttattttcaaattaaaattaaagccgggcgtggtggctcatgcctgtaatcccagcactttgggaggccaaggcgggcagatcacctgaggtcaggagttcgagaccaacctggcccacatggtgaaaccctgtctctactaaaaatacaaaaattagctaggtgtggcggtgcacgcctgcctgtaatcccggctactcaggaggctgaggcaggagaaccacttgaacccaggaggcagaggttgcagtgagctgagatagcaccattgagctctagcctgggtgacaagagtgaaactccatctcaaaataaataaataaaataaaattaaattaaacttactttgacttaaagtcatcagtggccagtttgcagttgtcaagctgtacagcaagtctagaattctctgctttcgtgcataagatctgggaagcaagtcattatgtgataaatgattctttgagagaaacctaagtaaacttctatccaacagctatgccattagctatcttttgaaagtctttataagaaagtataaaatcaccctcagcctgcttttttttattaaccttgtcacttcatgaagaaaaaaagcagagccaatttagaaacaaaataatgaaataaaaaggtttagttttttaataacataagacattttgcaacattctcaggcagttgaacaccattaatgttttctccatcagtagtttgtattatgagtatatcctctcccataataatagaaattcatggagagaagaaaatgattactaggtagttaaaaagatggcatttcatgatctgtgttcagataatgtaaatgttcagtgtcacgtacaaaagcgattttggatataatacagtttttctgcattctatagatgatgaaggaaaagtctacaggcaagttactttattatagtcactcagtaatcaggggtagctctggggctgatgctgaggttttctgactttcagtccggtgctctcccctatgtatcactaactcttagaattttcctttcccttggtttccttctgtaaaacagccccttctagtagaaagataaagcaaaccatagatcaggaaggtggagcactagggcaacaggacacagaccttttgttggagatcttcaatggtgttgaagtaacgctgataatccgggcacaccattgggatatcctgttcacattgttcttggatcctggattccagctctgcgttggtctcctccaggctgcgcaccttctccagatagctggcgagtctgtcattcaggaactgcatcgtctccttctcattgctagtgaacaccccatcctcacaccaggcacagttccccaccaagcagggactattacaactcccagtaaagtagcatggcaggaggcaaccagtcagcccgcgagacctggataggaagcttggagtctgacatcgggatgtagcacaggtaccggggagacaagctgtttccacggagcagcttgaggcaggtgcacaaccggaagccgtgccacaggactcaggagagcagtgtgtggaggagcagtcagaagtcatccttccagaagcaaagacagagactggctgcaaaacttcagttgccttgactccaaaactctcctctcctgagagttttataaccccccaaaatgggtgtttacagactgcaccggatgttttctttatcactgatggtgccagttttcgtacaaacatctcattagagttgtttatttactgaggaagagttttatgcctcataaaatagggataactttaggttaccaaagcaggacccacaccatttccatgtgcaagacaaaacacttatttcagaaaatcgtcataggaagcattgtgcttttgacagaataataaaagaaagagaaaatttggccaatgaataattatagatacaactcattacaaatcaggaaaataatatgtccacagattttgattctgtggattgattgcttgtgtccccttttaaaattagtattacagctcacaaaatgacaattatttgtttgtgccaccaccataaaaatggtcagtgtgattagtaatctttcaatgctttttgtgatctcagagcatgtgctgataaagactggaggagtgagctatatattgggtttaaagtgtgtgtgtgtgtgcaaaccatgtctacctgcgtacaaatggaaaagtcactttacataactgataggaataacttgtttttctgcaggctaaaatataaattggttagagctggaattatgatctttgatttcctgaaacttgccttctccacatttctcattgcttattgttagataagttatactattttacctgtattcctaataagagtgaaatataaattctaagttataaccttttagtcccttgggaattccttaatgattatacttcagagtaggggcaaggaacccacaggaatcttttcttctgagatgtagagcctgttttctcctatttatttatttatgaaggcctgaatttcatgaaaattgaaaatactggaacttggaaaataaaattctatttaggttccaaatcagtaattccactggatgaaatctctggtgccaaatctgacagacaggaacttgagatacgtaatttttttgaattatctcttggatttcacctccattgtgaaggataatctatttcactttgcttggttttagtcgttacatttatttcattttcaaaggtgcatagagaaaattgtctctagaatttttaagaacattataggaaaaaaacagattaatctgaaaaagttaaaaaatttttgatccagaataaacttattttttctcctaatcttgagtgctacttcctaggtacctgatagtagaaaccaaaccaaaccaaaccagaagaacatatgtaagtgagttaaaatagtctcttaggatttattactccctgggcagagctgggtttgaatttagtgattctctttacacatcaacacttatgcaaaaagttcttagagtgtctcatggtatattgacgctgctctgcaacaaatatgagttcaaggattcaaaaacacttctgaaaaattacaaatctctgaaagaaaattatcttttcacagtaacctaatgagtcaaaagaaaaatatctgtgaagaaaacccatgttttggttgtccatcacaggctccagttagctaaaatgcagtcatgtaagtgcaggtaaaataagaaatatttccttctgtctggaactaatttctaattgtaaattatttgttactggttattgtcctgcaggtaggactatttattttggtcttgattaattaggtagtgttgtataatgatctatagctatagtctccatcgtagaatatagaaatcacccagaattcatttctgtggagtcctccttagggaaaagaagtcaggctggcaggaccagaggaaagcaagttagtgggtgcagcgcaccagtatggcacatgtatacatatataactaacctgcacaatgtgataaataaataaaaaaaaccaaaaaacaaaaaacaaagaaagaaagcaggtaatgtataagactcaccttcttcatggtccaggacacatagccctcctgcacaatattcctgcacccagctatcaccagaccttcagctgatagaaaaatgtaacttagctcactgcaaccttagtgttatcagtaccacacaaaccctcttcagcacacagtacaagcaccatcctgtaaaatctccagcacgcctttgtctccttgcagacagccccttctctgctgtgctgcccattgcttccttgcaacgtattttcatacgttctctaatatatctgcctttctttacctacaactatcttgataaattcttcttacccccatgccaccagccccagatagttgctaatcacccgtgacaatttctatagcatatcatcaccagaagaaaggaacattgggaatagagaaaaagaaatagacatcatgaaaggccatgataaaaaaaaaaaccgacaacaacacggtagtttattttgcataatactatgctcttaccttacaacatccacctaggctgccagaatcattttcctaaaatacaaacctgctttttgtcgccttccacttatggaatgcaaactttctaccttggcaaatatgaccttccctaacctggtgccaatttacctttctgggctcacttcctgatgttctgtctcacaaaccctaagctccagccatccttcaagcttcgtaggtactattttcttggtcaaatgctcttctgctattcgtttcctggatgaactcacatgtcaagactcagctgaaacgtcgttcaactgcctcatgtggagatgtggctcctcccagagcactttgcacgcatctctgctatagcagttgtcttgttgcttttaacatttgtgcgacaggttataagagtttacatgaggccttaagaaatttggctcagggccagagctagtatccacgtgcagcaacttggttgattttcactgttttgggcaacaacctaaataacttttaacagtgcctgggaatgttcaagggtcagctcgggttcaagctgcaggggaaacacacagctggctgggccacagggtggtcaaggtaatctgtttcccaaggcaaagaaggaagtggagggatgatctgggtgaccctacaacatgatcaatcatattgaataacttggtcactctacattatcctttatgtaaattgttttattcagttagttgataggattagcaaatggatttccacccccatctatgttcttgagaaatatttcctgtaaatttcttttcttctaatgatcttgttaggttttggtatcaagttacatactgggttcacaatatgacttagctctgcgtccccacccaaacttcatctcaaattataaaccccaaatccccacgtgttaggggagggacctggatgattggatcatgggggcagtttcccgtatactgttcttgtgatagtgagttcgttctcaggaaatctaatggttttgtaagtgtgtgacagttcctccttcccacgctctctctcacctgcccccatgtaagaagtgcctgcttccccttccaccattattgtaagtttcctgaggcctccccagccatgtggaactgggactcaattacacctccttcctttataaattatccagtctcagatatttctttataacagtgtgagaatggagtaatactgttcataaattaaattgggaaatgtttcctctttatttcatgaaattctgtaagattagtgttatttattccttaaatgtttgatggagtccagtgaggccacctcttccaggagtctcccatgtgaaaaagttgtgttttgtttttaactaggaaaaaaaatgtctgggcgcggtggctcaagcctgtaatcccagcactttgggaggcccaggcaggcagatcacttaagggcaggaggttgagaccagcctggctaatatgctgaaggcttgtctctactaaaaatacaaaaattagttgggcatagtggcgaacacctgtagtcctagcttttcgggaggctgaggcatgagaattgctgaaacctggaaggcagatgttgcggtgagccgagatcacaccattgcactccagcttgggtgagagtgagactccatttcaaacacacacacacacacacacacacacacacacacacacacacacatgcacacacacacgcaaatatatgtatatttgctgacctctacatcaaattgcttacctctacttatagaaacctcacaatgctattcagttgttctatttcattttgtgtgaaagttgcatttttcaaggagtttgttcacttcacctaagttgcaaaaatactgaaataaagttgttcataataatccttatcatgaattttagtatctgcagtgtctataaattctcactatttaattccagatattggtaatttgtgttttatctcatgcttcccccatcaatctggcttgatgttcatcagattaatactaatgtattgtttatttcaaggttgctgaaagagtagatttttgatgttctcaccataaaacaatgatcaggtgcttaggtgatggatatgttacttagcttgatttatctttccacaatgcatacataaatcaaaacaccacattgtaccccacaaatatacatatacacaattattatttgccaactaaaaaataactaaatagaagtactttatgaatcctttcaaagaatcaaattttagcttcattaatttcctcgttttctattcattgatttctgatattatgtttattatttatttctttctccttactttgaattttaattgttctttttctatttagttgaaatgaaaacttaagtgattgatgaagagataaatgaaggtgataaagatgtaaatcttattttctaatataatcatttgctgtatattttctactaatccaatgctgtatgtatcccataaatttttaaaatcttttgttttcattatcattcagctcataatatttcttaagctgtattggtatttattatttgatccataggttattagaactgtgttgtttgattttcaaatatttggtgatttttctaagtatctgattgatttctcatttaattccattgtggtcagataacatattttgttagattttggaatttatggagacaaatttaatggcccagaatatagtctattttggtgagagttccttatgcatttgaaaagaatgtatattctgcaattgtagggggtaacattctgtaaatgtaactgagtaaaattgtttgatactattattcaaatcttctttctccttggtaattttcttatctgtttgttctctcagatcctgacaggggatattaaaatcaccaaatgtgattttggattcatctatttctctcttgacttctgtgattttttgccttatttattttgaagctctgttattgggtcatatttttaaggattataggaccacctgatgaattttccctttttcattatgaaatatcaccttaaaattatctaatatttaagtgaccaaacttctttcttatcattactatttgcgtggtatgtctttttttcagactacataattcaattttcttgtgcttttatatttaaagtgaatcactttaaaacagcatagtgctgggttttctttttaaatccaatctgacatcctctgactttttattggagtgcttactttatatttaatgtaattattgatatggttggtttaaaatctaccatcttgctatttgttttttatttccatgtgttttttgcttcctttcccttttatttctcatcttattttgggccaatcaaacattctactttattttctatactagctttataagtatatatcttttaatggtttttctaaagggtggggtagttctctcaggattatgatatgcatctttacatttttgtactccacttggaattaatactgtagcactttatgtaaaatacgagaaccttaccacagtagggttctttttgcccctttctgttctttgtgctattattgtcaaattgcttacttctacatatagaaaccctacaatgccattgcttttgctttaaatcattgtcttttagaatatcgagaaaaggaaaaagagaaagtctcatattttatccatgtatttaccattttcagtgtttttttccttcctgaaggtctgagacttcattttgtataattactcttaaaatttttttattgtggcaaaatacaagtaacataaaatttactattttaactatttttaagtgtacaatccagtggtattaagtacattcaaatgttgtgtgggcatcaccaccgtccttctccataactcttttcaccttttaaaactgaaactctgttccctttaaacaactgcccatgaagcccgcccttgtgtcctggcaaccattgttctgcttttcatctctatgatttttttactacttttaactacctcatataagtgaaagcatataagtgaatagtatctttttgtgctggcttacttcacttagcacaacatcttcaaggttaattcatgttgtggcatgtgtcagaaagtccttcccttttagggctgaataatattccattgtatggatgtaccatattttgattatccatccgtctatcaatgagcacttgtttgttttcatattttagctattgcaattattgctgctatgaacgcaagtatacaaatgtcttttagcgaccctgctttcaattcttttgggtatatacccagaagtggaagcgcaagatcataaggcaattctacatttaattttttgaggaagtgctatattgtttttcacagtcactgtacaattttaccttcctaccagcaatgcttgagggttccaatttctctctctctctctctctatatatatataatgtatatattatatattttacatatatatgtgtgtatatatatataaggggttttgttttgttttttgttttttgagacggaatcttgctctgtcacccaggctgtagtgcagtggtgccatcttggcccagtgcagcctctgcctcctgggttcaagtgattctcttgcttcagcctcccaagtagctgggattacaggagcccaccaccacgcccagctaatttttgtatttttagtagagacgggatttcaccatgttggctgggctggtctcaaattcctgacctcaagtgatccacctgccttggcctcccaaagtgctgggattataggcataagccaccacacctggctgttttgttttttgtatttatttatttatttatttatttattttatggcagccatcctaatgggtgggaggtagtatctcattgtagttttgatttgcactttgctaatgattagtgagtgatgctgagtacctttgcctgtgctgattggctatttgtatatcttctttgaagaaagtctattcaagttctctgtccatttctgaactggtttgtttgttttttgtctttgaggtaaaattactcttaaaccaaaaggacttccttattgtttcttatagtgtagatcttcaggcacttaaaaaagaagtcagctttattcacctaaaagtgtttttattttttctttaattttgaaggttgtttttgcagactgtagtgttcacaattttttttcctttaggaccttttaaatgaggtttgattttcctctgacatccattttacctaaaaagaagtcagacatccattttttctttgctgccttctatttgatttgtttttttttcttaattggtattcagcagtttgactatgatatgtgtaggtggtgtgtgtgtgtgtgtgtgtattgcaattatcctgctaagtgtttattgagactcttgaatatatgggttaataaaatgtcaccaaatttcgaaaatttttgcttttattccctcccaaatttttatttcctattctttaactcctctcattctgagactccaatttcatcctcatttcaccacttggtactttcccacaggcttcttagtttcttcaatttctttttcaatccttttttctaccctggctaggctggaacctcaaagtctgttaatagtgaatgacctctggtatctccactcagcttctaatcacccagcagccactctttgctatgcctgatggaatttcagccagcgtatttgcaactgtgccttctgtaagtacttgagaacttttacacagtcttctttacttacctacgtatatcttcttcctctccagaataactttccaaaccccatttagatatagctactcgtgttgcaaacatgacctgtgtagagcaagaagaacagagtatttccatcttgaactctcttctccttctcggctcctaggctcaattggtgacataactccactgtctagtctttctttgatattttcttttcctccatatccctttgatgactagctgcagtcaattcctctttgactatgtctttcccactttacccccatgacaacagtcttcattgttctcaattttatgatcccacagcactttactaatactgctggtagaacacatctttttttattataacacagcaactggcattcgataattattaaccgtaggaagaaacaaatggatgttgtgtttgtatttgcttcacctgccagatggttagcttattttcagcagagacaataaaacacaggacacacaatagacatttaataaatcttagttgaataaataatgacattattatatttttttcataaatagatcatgtcacctggattagtttatatattttgtcatatttggtgtttgggtaatgttcagtatttctcaacctgtctgaaaccattttttgggaggacaagtcaggaaaagtctactttcaaatatgccgatgtactagaccatcttacatgcaaggatgtttaattttcttaaaacagcaagaacagcaaaattaagaaatttttgtccatactgccaccattttcagtttcactaatgtttccagtttttctttaaatgccaatgttcagagttaagaaacgcatttaatgaatgaacagaaataaacagaagtaattgtagacacttgtgctatgccagagatgtaaaatttattaggataatcatgaagaacttccttaattttcagaaagataccacccaagactgaaaacagaattcccaaaccacccacagaaagagacactttaatatgaaggaatcgaacagcttcaggaagctataggcatccactgattcaaactgcagttggttatagctgaatggtcattgaaagtttcttggtctctttttttttgcagggggtgattgtggtagtaccatccttgttccaatttctaaagcagagtacattagttgtaggtactgagataggtgaatgctaaagcttctatgttgactttttcaatctcaggcactgagcaaagtagccatccattagcagcctcttgggaggcagggctcacagcagggctgagtgaaggtggtgaggttgagggtctccaggcctggagttggctggcaggagttgagcaggaagcaggtgggcacgcagggctgaggaatgtggcagggtgggggacagttgtcacagcaggtgggctccagtaaccaaactgtgtgtgggcaggtgctgggcaggcagactccacagcggcaggatttgtcagaggagcagatggtggtggcaggcccggtggggacactgcagcctcgagaggcacagcaatccatggctattagagtctgtggtatttatgggtttgattgaaaagaaggataaggcttctgaggtgtgaatatctctcctttctctggggctcttatgtaccctctccactgggagttggtccagccaagaggcttctttcctggttcttgtttatgttagtgtacccattattctttaatttgtttgacatttagactctgtaaagagtccccattttcctaattaacttttatttgagttcgttgctaaatctgaactgattacccttgctatttgtcactggaacacaagctttatgaggtatcaccaaagccttctgttattatattttcaacaccagccctgctggggaatattgcatgacagtgagtctgtaatatgtgggcctgctctccagtgctgctttatttttaatctgtcactttatctataccaatttgtctgataaagtattcttgttttaaagagttgaacttaattttactttcttttagctttgaggcttttgaagatcaaaattacattaacatgaagaaatatgccattaagaaatatggaaaaactttaaaaaacgcttattattctagttttttactacaaaatattttgtatacattgtttatcattacattacattactggaatcatattgtgcataggttctgaaacttgcctttgtgtgtgtgcatatatattatatatatatataattatcttatattttaaaggatatttgatagtgttacttttaatatttcttagcatttattatataattgcacttctatgttactttaaaattttatattattatgcattgaggttattttccacttttctctacaataattttggcaacagagcacctctgtatgtaaatctttgtgcatatttttgattatttcagaaacagaattaattatttggtagaattataggggcaaatgttaatttccagtatttttaaggcctttcatatcattgccatactgtttttcagaatggttctatttacctactttttttttcaaattatctatttccaccagatgtgtttgattaagaattcccatttcgtatacctttgacagatactttattttaaaggtgttttccaatttcattggtgaaaaacacaattttatgattgttgtgtctgtatttcttttataaccagctaggttgaaatattccttcatatgcatattggccatctgtcttctattgagagttggcttgctttgtttccttcactgctaattgtgggcaaattgaatttttagcttctgtctatatagactaaataaaataataacttaagaatacaaaactaaaattcaagtaaaattattaccaaaggaaacttatgagcctgagctagattaatctgttgacatttgatttcattctctctctctcttttttttctttttttttttgcaaggtattgcattttttcctgaaatcaaatgtagctgtggtaggaaagacctggttctagtaccagtacgctatttagactgcaggcatagttcagtgtttaagagggagcacaaggtgggcttgtggccaatatcatttatacacctcgaaccatttccgctcagcttggtctcatgcttcttgcaagccatggttcttctcacattcttcatacctcctcttttaggcacacctgttgagtggtgcattgtggtgtgcatgtttgtatgttttgggaatggggacgtgtagtcaagaggaccacctgaggagtcagaatagctcttgactgttcccggtgctgctggttatcttcctcgttatggtaagtaattcacttttaggagcttcatcctttttctctgcgaaatcagggtaatagcatgcatattcctccacttagaagattattgtgaggttcacatgtgataaaaagggtgaaagctcatggacaaccatataatgctatgcaaaaataaattattatcatgattgaaacaaattacagatgaaattcaaggcaaggtaaagataaaagaaacatagtcaaaagaagaaaagaaaatgagatgaaggtaagtaagagagcaaccttacaggaaagagcaaacatttatattagtttatacaaataaataaataaataaataatcacatctacgattagagaaagtggttggcatataaattaacaaacctaaaaatttgaaaagctccctatggctctgattgaaagggagaattcatgatatcttctggttcctggactttccccagatttatctttgtatgaatgcctgccgaagtgtgcacccttttacttagaactgattagtatttcacttattatttaaaaagtaattcaacagacatttactgagcagttactatgtgctagtcactgtgataaatgttggatttatagcaataaacaagataggcaccatccttgccctcatgaagtttacagtttggtggaagaatttttcatacacataacatattattataagctgctgctattatacattataataggaaagaaaaagagtaaaagacaaaaaataaaagaaaaaattattttgagggaaacattacaaaggaaacatggcttgcagaccctcaggattagaatttcatggcagaaagctatcagcttcttacctgggatacaatattactttgagttcaccataaaagcttagagcaactattactgtttatgcagcacattgtgtttctctaatcataaataagacaaggttacagattacaaacagttgtaatgcaacaagtttattataataagctcttctcttttattgacaagacttgcagcactttattaaaatgtattttctctgcagtggtctaagagacctgagaattactctcctttgtttataaatgatgacagtgattcatagagaggtgagatgatttgccttagatggttcgggagccagtgtgttaaaaactaaatataggacctattgggattgagctaccttttatgtggttagaaatggaagtttaaactatgtgtcagagatactaagcattttatttttaaaaacaacgcgtatcttttttctttaagtgaatgtaggaaaaacatggtgattcttgatgagatggtagattttcggggtgctaaaaatctagacacacacacacatacgcacacgcacactcacacatccaagaagtccagttttaattatatctttctatagtcaatggagggatctgggacagtgcagatgtaaatcaaagattaataatgaaaagagacagaagcaaaacatgattatattggtctcttgcttgaaatatttcattgcttcaaagtttcagtccaaacccctttgctttgaggagccccttatgtctgggtctttgcatttctgtcttctctgcctcaccctcttcaatgcattgttcatccagtcattcccaactacctcctgtggcttaaagacaccaacctttccgctgcctccatgatttattaagctgctattctgtctggaacaactgttccctacctctcctgctgcctattcatcttttaaagcttagactggatagctcagaggctttccgtagctatttctcacctttgacactgaatcaccaaatcagggttttagttattctttctgtatgcttgcatgccatgctgctcacctcccagtcacagcagaatccctcagcattgcaattattattatgataacttgtctttcttcttcactagatttgggagagacttgagggcacttgagacttgaggtaatagcatttcttttatctttttactcctggcatcaatatgatgcctgacatagggcaaacactcaggaaatatggacaaatgaatgagtgaatggactagatctcttgttgacaatatcctctgtagtgtcccatagactccatggctgctaagttctgttcatttaaggttgagctgtaaaaagcctatggaatcccgtgagaaatttctctctcaagacactaacaggtacattgaggacattttaaaacaagtttgttaaaaagcatttgcttctccccttccttgtcctactctgtttcttgcatgtcttcttgtggttttatttcaatgcattttcagattttgacttgtgtctttatatatgtattgtgtatagatatacatacacacatatatttatatgtgttacataaatgtattggatgtattatatatataatatatacttgttctctctaggcttggaaaagaaaaatcttcatgagataaaattaagtaggttgataaaattaagtaacgaattaaagcatacgtaatcagagttttagctctcaacctgagacacctgaaaagtattggcattctattgattactgtggtagaacatctgtgctgagtatggtggcaaataaaggtatgtccctggtgccttgttactagagttgaccactttgagttctctctaagagaaaatgaagttgaaataggtacaccttcaaaatgcccagattttagaattgaatacttgccaattttaatctatgaaccaatgtactctttttctattataatccgatgtggattttgttaaagaatcttacatgttttatttctcttgcatattttgggtttatttcataactgtgctcattaagcttctggtttcattagtattgaaggttctatgatgtggtaggaaaaattgggctttagagtcagacatacaagaggctgaattctgattttctaagtaattaactttatgactttcagaatgttgaataacgcttaaaacttcattttttcttatccattagtgctgttttaaggactaaatcaataatttactggtgaagagtagataaataaatgttggttcacaccaaaattgcacttgtctgaggaagaagagagaagagaaggcaaacatgaaagagaacctgttaaaagttagcaagccatgttagtagtagcaagaatgttagtcattctgccaatagagtcttctttaaaagattaaaataatcatcctgtttttacctttttaaaatggaagaaatatacccaaaactaacataaacaaatgacacatcttgccagagaaatatagtttattggaaaacccaccaagaaattttcttctatgaaaatacccagtacaagaaacaagagccaggaagcaatatgatcaagaacatgtaatctgaggtcttaaagattgaaacagtattttgctaataaaactcattcacctgcccacaggaaccaaatggtttttcagctaaataaccataaaaaatacttttctttttttcccccattaaaaccaaaggtaagttcttcatatctgggtcatctggtctaccttaacatctggcaaactactgaggcaagtgaatactgaagggacagcttctggattcttcgttgtcgggcactgagcaaagtagccatccatcagcagcctcttgggaggcagggctcacagcagggctgagtgaaggtggtgaggttgagggtctccaggcccggagttggctggcaggagttgagcaggaagcaggtgggcacgcagggctgaggaatgtggcagggtgggggacagttgtcacagcagatgggctccagtaaccaaactgtgtgtgggcaggtgctgggcaggcagactccacagcggcaggatttgtcggaggagcagatggtggtggcaggcccagtggggacactgcagctgcgagaggcacagcaatccatggcaatgggcgtctggttagctttcagtttcttagatgaggattctgaggtacaaatgtctcctcttttgttagggctcttatataccctcccaagtgggcattggtccaactggaagccttcctgttttgtttatggcaccctttttcactgagattctctaatcagtttgtcatttacatgtccattaagagttcccgctcttattaagttaatcatatttttgactcattgacttgtcatttttgtcacaagatcatcacattttgtcttcacaggtttctggcatgccaaaccttatatgacttttatgggtaatcaatccaagtgacaattcagctgtaattttggaggccaaactcttcttgtttttccctcttaatttaaaatactatggataatgtgatttctaatgactaatttcagaatgagtaactcaaatgatgaactggaccattttcaactcaataaagtcaacaagaatatggctatttacagatgaatgtttcatgtgactacaggcatctcggacatgtttgcattatttagtgatattataattcaggttctattgagcaagcaaagtggtagaatggtacaggatgaagaaactcctttttattatttttattaaatctgtagtgaatttctcaatgttgtattattctatggattttttttttctaaaatagtctctattctcaaagttatgccaatcttgtggtgaatcaaagtataaattcattggaaggaaggatccacacagtggccattctttgttgaatataccactaaaagaaaaccacctcagccttgattcattttcacatgaatggtgtacatactttaaaataagatgaaataagaattaaaaggagaaaccacaagagtcacagaacaatcatggattttggcagggaatctgactcaatgcaatttagaactatggcattcataaaaatcactttttcactgacttactccctactttgcatgtttatttgttttcataccttggatcttgaactagattgaaattcctttgaggtatgccttaaacaacattatttacttaagtcagccagagattgaactagataatatcaaatgtgtaatattctagattccaacatcttcctacacctgtccatgatcagcacaaatcctttcagataatattgtataatttaaattacatactcgttatgtggcaatttgttgacttaacagaaagcaaagattccgggtaggttgtttctgaggggacattaccaaaaaccagtacgatctacttaaaagagaagaaagctggctaaaatcagtggaaaatatcaaatgtcattggtaggtaagccttatacgttatacgttaaaacaaccagtttatctttttctttaacaacaaaaatatgtggtacatatatgccatagaatactatgcagccataaaaaataaggagctcctatcctttgaagaaacatggatggagctggaggctattatctttagtaactaatgcagaaacagaaaaccgaatactgcatgttctcacttataagtggtagctaaatgatgagaacgcatggacacatagaggggaataacagatgctagaacctatcagagggtggaaggtgggaggagggacaggatcaggaaaaataactggtaggtactaggcttaatacgtgggtgatgagataatctgtacaacaaacccccatgacaccagcttacctatgtaacaaacctgcacaggtacccctgaacttaaaagttaaaaacaaaaaaacagaaaacagcttcaaatcatttttattagcaggaatttacaacaaatgccaagggtgtcgaacatcatactgttaccagatggtgccatgcagttccaggcttttggtgtcccaaagaattggacgagacacccacagcaaaacaaagaaacaaaagtgtattaagcacagtattacactctaagagggggagagcaaaccagcctctgtgagatgagatcagcccccagcttggtgcagtttgcgtctttgtgtgtgtgtgtgtgtgtgtatgtgtgtgtgtgtgtcccttcccaaggctgcctaatctctagccagtgtttgcctctttgattgacaggtgtgttgcttagttactttggcccctgtgtgcttgcgcaccacctccagcccataattttaagtacatacatgatatgcagtccatatgcataagcctgaatgagctgattttcatacaaggtcatgttaaggatacgttttctctttaatgcacatgcttatccatgaagagttgccccttactggtttggtccttatcttgccggccatgggggccttgctttcttctctatcttactttttgttttggctggagtgcagtggcattctctgctcactgcagcctctactttctgggatcaagtgattctcctacctcagactcccaagtagcagctgggattacaggtgcccgccaccacacccagctaagttttgtattttttgtagagaggggtgtttctccatgttggccaggctggtcttgaactcctgatctcaagtgatccacctgcttcggcctcccaaaatgccaggattacagcatgagccaccgcgcctggtctaacttctgcttcttatcttgcttcttgcttacctgccccttcaccttgcttctggtctctgcttttattcactccaccctttatccaagttttaattccctttgctagtctcctgcctcaatacctgcactttaccactgaagaacagataagcaaattcaagtggctttcccagtatattataaaattcaaagttaatgaactagtattgaaatcgtcaaggaaatgtttaatgtttacttactcttgacttaccagtctctctcatctagaagccagtggcttggcaagtagaatatatgaagaagaccctctcccattctctgtgttctctctgacttctcttttaaaatcgattttgaaatattatatagattcaggagatctactgtacaacatggtgactatagtgaataaccatatattgcatttttgaaaaacgctgagagaatggattaagtgttctcatcacaaaaatgataactatgtgagtcacgcatatgttaatcatacagcacattacataaagtgaaggcgggagtctcctaggtactttaccctctgtgacctcgttcatactgtttctttagcttaaagtgacctttcccaattctctagtttccaaatcctgttgatccctcaagattcagccaaacatccccttcataaagaaactctaggtgattcttctagatgtttgcatccttttctctgctctcacaaaatgggctgcctattcttccctttcaacctcatttctttctgctatattttgtagtttgtcacttaaatttgttttcctcactccaatgcaaggttcttggaagtggtaatcgtatgttagttttatttgtctttttcaagcacctaggacaatgcctgaaacagggtaggcatttgataaatatttgttgaattggattacatttcagattagaattaaaaaggtatttatttatttttataatggccttttataacagtaacactttatataaagagagtgattcattttttgtgtgaattgctttacagttgtcaaaacttttttttttttttgagatggagttttgctcttgttgcccaggctggagtgcaatggcacgatcttggctcacagtaacctctgcctcccgggttcaagccattctcctgcctcagcctgaggaatagatgggattacattcatgctctaccatgcccggctaattttgtatttttagtagagacgggctttcaccatgttggtcaggctggtcttgaactccggacctcaggtgatccgcccgcctcagcctcccaaagtgctgggattagagaggcgtgagccaccatgcctggccaacatttttaaattcaaagatttacctaaatgagacagcgaaaaaaatgggcttggctcaatctttgaggtcctttctgtgagcatgttgatctcaaattgctagcttcactgcctctttaaggacacgtgagtttatttagaggcagggaaaaaataaaaatcaaaggtagatgctgaccttggcatttaaaacgattctaagcttagagcctaatgcatttcactatcctcacagttttcttcaggtatctacgtatgcctgtgaggcctctttttggctatgaaatttatgttgatgtcatcagaaagtgtaattctgctggatgtatttttaagttcatgatgcatgtgtcaagagtcgttgggtaattatagcattaaatgttgaggcagtatgtggtttggggagtagtggtgtttatttagttttgaagtaaggggatccatggtagcattttttttcccatttctcatttgaaatcattgttcaaaacaggaaaagaaaacttctgtaaaactgaaggcacagtgctatattttcttccaaatggcctcattaaaggccatttgctgagcagcgcttaatgactactgaaggtcctcagggtaatgtgggcaagctctttggctagcagcaaggtggttcacactctggatgcaggtggtgacagagagcccgctcagggttggagctgggtggcatttgttgagcagtcaacaggatggcacataggagtcaggcatgcagccaggcaggggccaggttcacagcaggtgggctgaaggaggctgatctcatgaggacaggtgctgggtaggcagacttcacattgacagcttatgtcagaggggcagatagtggtggccaggccagtggggacgctgcagcatccttggagataggaatcacagcaagacatagtgacagtggaccaggacaatgttttgtggcaaaggaaggctttcttctacaaggttgtcctctatgggtcttttatatccacctatctcagggaacacggcttctgtccatcagaatgttggacggaacatccttgttgctgtttacctaattctgtaaaaataactcactaacttcttatgtatcagacaggggatgagctctccttcagttttatttagttgtgttgctgcattcaaacttgctttctgttgtagtttcaaaatggtgtcagtgtagttttccacttactcacatgtagacacatccatactgtattagtctgttctcatgctgctatagggacatacccgagattgggtaatttataaaggaaagaagtttaatggactcacagtagacccacctcagcctcccaaagtgctgggattacaggcacgagtcgctgtgcctggcctcaataacaatttgaaggaaaaatgaaatatcttgttttttattatattatcaaggataaacaattattaatgttaagggcagttgttttaccttgattattgatgctgaagttgaactgaaaatgtgtttgagttgccaaacattctgcatttcaattcaaagttaatgatgcagccaatatttcttctctgctgacactgctaatcagtaaagtctgactttttaaaaaaggtttgttcttaacttagaaacacggataccttttttaatactcattgtatacactcattttattttagactataatcaccacagagaaaacagagaaaacaacaaaagatacaattgacagggatagtagagaatatattgtcaagtgtcatatactttctcctgaataaagagagccacctatagtcacatttctctttgacatattgctgtctgtggggaaggtgagtgctttggtgtagtggaaagagaagggacttcggacttagtttggggtttaagtccttctctctcacttatgatttatgtaacttttgcaagtaatttagtctttctcagcctgagtttctgcacctgttagtggcctttcttcacctgttagtgatgcagggcaggggagccccaaagtggggcttagcctgcaagggttcttggctttgcctagggaagaattcaagggcaagccagaggtagaaaacagctttattgaagcagcagtgttacagctctgtgattgctcctgcagaacagggctacctctgtaggcagagagtagcagctcagggcagttttgcatatttctacctacttttaattagatgtagattaaagagtggtttgtgcagaaatttctaagaaggagtagtaagttttaggtcattgggtcattgccatggaaaggggtggtaactcaggtgttgccatggcaatggtaaattgacacagcatgctggtgggcatgtctgattggaaagctgtttctgtccccatcctgttttagctagccctcaatttggtccagtatctgagccccgcttctggagtagagtcccaccttctacctcattagtatgtccagtagatactcactcagtgtgagctattcctaatgaaagcagtaaaagtaatgaggtagaatgggcttggttagttgcatggggtacttgttacttagaatgcttctggatgatctagaatcatagaatgttaaaacgaaaagcaaccttagagatggtgtgatcaaccaacccattttactgctttaacacctgagaccccaagaacttaattgacttgcttagggccacagaggcagctcaaggcagagccaggactaaaacaacacatcttctggtttccagttggggatttataactaggccagggcccgtgaatgctaaagaccatggtagtagtaataggaacttcgagttattttaggtattaaaaacaaactctaatttttatcccttactagcatgtatgaaaacatgaaaattctttgtttttgactagaaaaaaggtaacttggcatggtaacaaaggttattctatagtaatcctaaacatttaattgatatttataaatgtatttatgaacacaaatgaaggaattaataaacatttttaagaaagccatttgggaaaaatacatatttcaagaaataaaaagatgcccaacctacgtatccatcatccaatgagtggatagagaaactgtggtatgtatacaccatggaatactactcagctgttaaagggaatgaaacaatgtcttttgtggcaacttggatggagctggaggccattattctgagtgaaatggagtgggaaattacaggaatggaaaacaaaaaaccatgttttcacttataagtgggagctaaactaagtatgcagatgcatatggagtgatataatggactttagagactcaaaaagtggagggtgggagggaggccagggataaaacactacacattagctaccatgtatactccttgggtacgggtgcactaaaatctcagaattcaccaccactatataattcatccatgtaaccaaaaaccacctgtaacccaaaagctacggaaataaataaataaataaataaataaatatttttaaaagatgtcttttggtgagaaagttgggaacttccatatggcagtaatggtgagagtctctcatgtgtaacaggttgatgctgtggacacggtggtttctacacttcagggcatctggtcctcacaataatcctgagacaaaagcagggcagagagtaataacaagctaactgagcctgtaggaaaccaagctataggtaggaaaccacgctataggtaggaaatcactttaataacagggaaattgagactgagagggaagcaattggcccaaaggccaaaggcaagtccaaaagtgtgtgtgtgtgtatatatatatatatatatataatcacaatacctttattttttgcaaagacctaattgcacctagatttttctaagataaataaggacatgaattagtggttatcgtagtagttttgttctaatagaaactgtgtgtttttgctctcagaattgtgtgactatttctggtgtatagaaaatactacactgtagtctgatattttaagcatatttcaatgtcatgatattatatgtcacttagactagcaaacttctaatcatagtcatgactaatgtaaaccaatgtaagccccatttgaggaatcaatgaatactcgataaatgctaacattaattaaaaatggattgttttggaagacagcatatatgaagaaatggatatatacacttctcaaaattgctttgcattttgagctcagaatttcagatgactgtgaggactaggataatcaaattatttatacacaccagcacagtgatcaattcatttagtcaattaaggaagaaagaaaaatcaatgtcagaatcaatggaaactaaaatcaagtatttttaaaacattctgttaatctctagactctagcatagtgcttgcacagtggatgtcttccaataatatctattaaataaatatctgttaaataaaaagcttctataaaatgaactaccacattttttactttttaacttatcacaaataaccagtatctattttttcgataaattccactatgagagctcttattctgttggggtaaatcttggatagtgtgataacctactgttcaggtttaggtaggcattccactttccctaatgggagacatgaaaataaataatcacaaggtcatatttgctaagccagaataaagtttattaacaaatggtcaaaatggttatttctcaaagagtgatgaaatagcctaaaagacagaagggaggtctccaatggtacccaaatgtgcaaataattaagaagattcatcaagacttggccccggggattgggatggccttagccttgatgtaggcagtagtgagtgctgaagcccagatggtgcagaggacattgggcagccacctcacggaacctgtgcagactcggctggttaacagcggggctcacagggactctcacagccaggctgaacataggtggtcaggttgatcccactcagtccgggagtcgggtgacagttgttgagcagccagcaagttggcacataggtatcaggcttgcagcagggtggggggcaggtgtcacagcagatgggctgaaggaggctgatctcatgtgggcaggtgctgggtaggcagactccacagcggcagcttttatcaaatgagcagaaggtggtggcagggccggtggggacgctgcaggagcggagagcacagcaatacatggcaatgggaggtgggtttttgttgagttgagagaagtctgttggtgtctcgatgctcctctcttctgctctggctcttatatacccatctccctgggcgtcagcctattactgagggtttttcccccatgtttcagtttatagttatttccataaaaaatgcctaattacttaagtgtttattacctaagatacactgctcacctcataaaagagatttaggttgttttgttgtcaaattaggactattcacattgccagtgtgtcactacacagaaatcttcattccagtcttcaaaggtaccgggccattatcttctaatcattataccctcactaataatggctcggtatgccaggcatctgcaaacgtttcccacttcttttgtttacttttcagatgaagaggacaagtaagctttttgtttgctgttctaccagtgactacaggttctatgtgatcctttaggccctcaggctgaaaaagtgatataacattttagatttattatttgtggctccaataaactgaatgaagatgaatggatagaatctatagagaaatagattttggttttgtgtaaagaggcactttcaaacagagctataacaaatcgtttgttctgcattcctttcaaatatgctctgaacaataacttggtaagaacatgcaggtgggaatgaagaccttcatgggtgacaaagatgggtgtcctttaagctccatccaactgtgttataaatggagattatttataaccaaaaggctggttgtattgggccattcagaagctaaatgatgcagtatttaccagactgagttccatgaacactggttccaagggacttgaaagtgttttctggtaagtaagtttgggaaatgctgaattcttcattgttgggcctctcggagcctttaatgtgctaaaatgctctatgacttttcaatacagagatatagcatatatttttctccaaacttacttgaccatggactgctttttgtttgttttcagagattagctctataggtcagtgctttatgaaacatacttggggagatttagcaacatcttacagcaagcttgttcaacctgtggcccagaaaggcattgaatgcagcacaacacaaattcataaactttcttaaaacattatgagatttttttgtgattttttttctttttttgctcatcagctgtcattagtgttagtgtattttatgtgtggcccaagacaattcttctttcaatgtggcccagggaagccaaaacattgaacacccctgtcttacttccaggctctgtggtccagaatagagacatttccgagtttcatctaaaccactaaaactctaaaaataaagttttaaaagtagataaaggtagaaaatttagtatgatgatttagaattactttagaatatgaaaaatactaaactggtaaaacctttagaaatggcttacttagaaaggcttaaaaacatgtacatattttcttgacccattttttcagataagatggctcaagttctaaagtagaaaattgcacaatgcagaggaatcagaagccaaatgagatgcaaatcaacaagatgttggattaaaaaaatgcttagcatgaaactgctttctttttagccattttcttattggaatgattttgcagttttggattcctatgctagaatttacatctctcttagatatttacatatcaaaattagaatttacatataaaatgctcattgattgaacacctgttgtatgttgggcatcatgcaaaaagtcgcaataggctcctgcccttacaggggtcatagagaagaagacagacacagagaagtaaaccagcaaacaataacaaaggattgtacatttagattttccaggttatgatatgagaatttagaggtagaagccacagacttctcctagaaaacttaggaagcccttcacaaaaagagaacatctgtttggatcttgaagggtgaaaaggagctgagcagatagaaataaataggaaggagatttcagccattgaaacaaaatgccacagggcccccatggtatgacaaaaagtgttgcctggttgaagcataggttctgaatctgttggaatgaagacggaaaggtgggttagtgccacagtatgaagaatttgtactgtgcttagtatcctacacttaggattttgaactttatcttgtaggcaataggcattatgtaaaggttgctgaacaggcatgtgacatgactagattttggaaggatactgtagtttttgagggaaggctcatcatggttatcattgccacttactaagtattaggtaatgtgctgagtgctttgcatgcattatttcatacagttcttacaacaaccttatgatgatgtatgcaatgatattatccttgccctttgacagacgaggaacctgcagcatagagaggctaagtagctagtgggtgagtagctggcatttgaagccaagcagtatggcttcagactccatggtcttaatcactgtgccagattccctcttgctttaggggtattgtctgactacagtgcagaagaccctcaagattagttgagtgtaagattggtaggaaggatgaggccaggtcattgaaggtcttgggaccacaaggggagttgagtttagagctattttcttaatcaaaagactatgctgtagaaaggaggaaacttgaagacaaggacaataattaggaaactatttgggtgttctaggggagtgaggagtgtcttagaagatatcatagttttgtgggaatagagaagtgggagttaccagagatttcttatcacatcattcagtttttagggaccaccatctgggtggtacagcagtttccacaataaaattaatatttttgtttttaaggtaatgggaacactaatcctctgctaacacttttcatggattggatgtataccatgtgtcaggcatggtgctaagtattattgtgcatcttcttccttacatcttacaaccctttaagatcactattgggtacactattactgtacccatttcccagatgatgaaaccaagaataaggatattaagtaatgattctaaagtcacactactagtgaacgatggctcacctaatagcaatagtttgcacaaaatcgatatttttgtggaattaaattttatataattgtagattatgctcatgtattttttaaatttattaatgccctcaacaaaatgtctaagactatgctaggtgctaagcatagagcaataaacaggtcagataaggtccttgttgtcaagtgggagagacagacaataagaaaactaacaaatgaataaataagaactccagagaagtgccagggagtgtattaccttagttagagtggtcagagtggctggactatagtgaagacaaggagcgtaataggaaatgaggttacagaaggtggcaggtggcaggccgtgtaggattttgaaggagtataataggaaataaggttacagaaggtggcaggtggcaggtggcaggccgtgtaggattttgaaggagtataataggaaataaggttacagaaggtggcaggtggcaggccgtgtaggattttgaaggagtataataggaaataaggttacagaaggtggcaggtggcaggccatgtagaattttttagttgttctacacagtttagattttactctaagggtgttgaaatccactggatgacttaaagaagggagtgataacattttccttatgttcaaaggaaaatgaactacagcagagcaaagtggaaactggcacgactagaaagtgtgaggatagacagttgatgctagtttttgatgaactgttaagaagtggtagagtttggaagcccttttgaaagtggagatgataggtcatgctgattgagaggatgtgtggagccaaggatcatgtctaggtgtcagatttactcgtagaaacagctgctgtctggggtgataggaaagggattggagatgagtttagtttgggacctacagacaaagcatcctgaagccgtgagagggagcagagctggacgtgcagatttgggaggctccaacatacaggaaaaattttgcttacaatgatgtgcctggactgagaacgagatagtcacttttatgtgcgttagtcatgttttgctgtgagccactttgtgccttacgaatatccatctcccaacaactcagtgaatttgtgggtggctgttgggaaacaccttccacagtgtcacctcctgagtcagcagggatgttaggaagcttcacaccttagggccactcaattttcctaaagcctgttggaattcttcatcccttcacaaaagcaggatatagaaacctttaaagtttgtcatcctaataaaaatgtctagtaaataaaaacatttggtcttcatttcctgaattgcatgatctttgaaactgccagtgcattcctttatagtatagattgaaagaaagaatggctggtatcaaggctgccattgacatcaatttattctttgtttactttgctatatgctgaaaattcatgcaaaggattctgggcttgggttaaatggtgaactttgggagtgttttccagttgcatcagattttttttttttccagtttgtggttatagtcaagcctgatatatctcatcaccttattagcttgcactgaaaattacccccaaattgaatttcttttaaatggaagtagtggtgttttccacttgaggacatctgatagtctctataattgtcatctggcaacatgcagggctgatctcatagctttcagtcccgtggcacatgcaacattcttgcaagtgattgcttagccagctggctggaagtgttacctatttttcctgggaaccctaggctttcagtttaattcttatgtattattgtaggctgtggagtatacagatagtaacagataattctttatgattaactaatatataaaaatatgtgttaactaaaattaatatgtttaggaaaatagacactccataaaatttgagtacctactatatgccaggcactggtaaaataaaattttcagctgcctactatgtgaagtattgagatatttaaacttacaattattctagagtaagctttggaattttcatccttggaattattttctaacaatagttgtactttataaatttattttgaatcagagacttttttctccattgattagataaatctgactactgtattgaattgaatgaccactgattttccaaagagctcctgcagtacttgaaattttttgaagagacttaattgttatgtatttaaatattagctgacactatggctttaaaatatactttgagtttttagcttattttactaaacatatagttggctatatggtaagggcaaattctcatacagaattttctgtgtgacagatttttttaaaagtgcactacacgtatcatgtcatttaattcttaccacagccctatgaggttggtattaaagctatcctctctttcatagctgaaggaaactgaggcatagagtggttaagtaagttgctcaaagtcaatagctggtaagtgatggaattaaaatctgaaccaaggccacctgaccccagagtctgcattcttagtcactatacattagtttataatttctctattattgattattgcatttttcaagagaaaatatataacttggtttatttcaacctatctctgttgagcacctgctgtttgctttgtactgtgctaggagatttaaggcattcaaggacaagcaggacatggtgtactcttaaatatctgagaatttactgggattcgcagggtacacagggcttgaatgcaaggcagaggagtaggaaggcattccagctatagggaacagcagcagtaaatgcatagaagtggaaaagaacaaatggttgttaggaagccatgaatagtgcgctgtgtctagagaacaattgtgtgagataaaagcaagatgtagagtcttgaccccaggatgaggtgtttgaacttgaattaagtagacccatggagaaccactggtatatatttttctaaggcaggaagttacctctttaactccgtcatttgtaaatatggctaatgttactatcacattgataggatgtttaaagaataaattaaagaaagcattaaaatgtgcaatgcagtgcctggaacatagtaagtcctcaataaatgattctaataggtgtgattgttgttactaaataagcagagggaggctggagcttttttcttccccgtcattttcaggtattctttctctccgacgatagggaatctagggctaaatttgggagtttagcttttaggtttcccacgcctggaaagcctgcctgttgatagtcttcattatagtttttgtaaccagtgaagaccccgcctccaaaaagcaaactgtgcccctcgaccttgctttgctggaaccctgtgagatcactggtaagcagtgtgcactcctcatgtcccctctaccacgttgcctttttcaggaggcagtcatcacaaacgcctagcaggatttattactcagaggggactgaagaaatgctctagctgcttgagcgtgacttcttcctcattctttcttattactatctgtgatttacatgaagtgacacaatttatattttgatacagttaaaaatttcctctgtagaataagatgtattgcaacagcttgtaattatagccggtcagttttcctgagtggaaatttgacatctgagtccattgggatgaaaagagcagaaaggaggaagataacatgagataaacgttcccactaatattgtgtgttttgattttcgagagtacaccacgctcagtgctggaggtgaagatttggaaggctccaacatatagatgaaaactgtgcttactatgaagcgcttggactgagaatgagatgaccatttttatgtgatccattttattcaaatggaatacaacatcaccctgagcaatgctcttcctatttttaaagctattttccacacatgactatctggctcatgctatcctctccatagccaaaagggctttctgctcctgaagacatacacttgagtggagaagaggaatagaaaataaaatttctggagcacctactatatgccaggcatattactattaataaccttatttgttattcacagcaatactgtgacatattagaacccccatttgatatagaagacaaaaactgagcttctgagaagacttgtctaaggtcacagtcagtgagtgagtagagttgggattttaaactcaggtcttctgattcctttctcatcccactctctgccccttcctacagttaaaaacatcttcagagtgattaaagtgtcaacctatactcaaatacaatagcagtccccattctttttgacaccagggaccggtttcatggaggacaatttttccatggactgtgggtgggatgaaggtgggatggttttgggatgaaactgtcccacctcagacagattctcacaaggaacgtgcaaccttgatccctcgcacgtgcggttcacaataggctttgcgcttctgtgagaatctaatgccaccgccgatctgctgagctgacaggaggcaaagctcaggtgggaacacttgctcctcggctgctcacctcctgccatgtgatccagttcctaacaggccagggacaggtatcgctctgcaacccggggcttggggacccctgagaaacaacataacaagtttgttttgcttagtacacgttaacacacaaaacaagtgttttgtatgacttctagtctcagcttctggttccctctaactactatccctggcttttgtgcagttctctttctgtttggtcccttctgatcactaaaccaacaagcgttggagtaaagggcaaaaatgttaacctcagagtttcctgaattctatctctaggattctattgttttgtctccctcaacctctcctgaatagagaacgttgaatttccttctgttcagagttttttgtggctgttgctgtcaacctctgccatctctaactcttctcaaacttcctcatgcttcctggcttcagttgctctgaaaatcctgagttctttcccttcttcctaccgtaaggttatcagcccactaggatcttttttttccagggtcacaggtgtcatcttttgaacaagtcagtactgtcttagagataacataattgtagttctttactctggccccatttggaccaagatttctctgatccttttgggaaaatatctcgtttgtttcattcatgcaactaaaataaataagatattaaaaaattgagaaaataaaagtcgaaattttgtatgttaaatattaacccattaaaagccaggaattttgattttcatgttgtgtattctaccactcctgtttctctatcccatatttgtaatgcaagaacaaagaagaaaaaagagaacgtgcttagaaatgaataggcccaacataggctcataatagttggtgctttggattagtctctctcaacctcacaaaacaattttactaaactctcaaatctccggtcttacccaaggctttcatgctttagttgatgtgatgattcaacattttctcccttcaagtttctcaacatccctttgtgtctttgagcttttaaaactaattctgtctaatcgcacttaacagaataatcatgatggagaataggtttcttaagtcagagttatgattctggggataagtcagtcattaacaaagggccgtctgcagtcaggtctctgggcacatcccacttttcatggaaggcctttgatagaaaaggtggaactttcttaactacagagcttaatgttgttgagtaatctttctagtttctcaattggattctaacaggtctaaaatgctgtaattctctgactgccatctccaaagctcagatataatttttttctcataatccactatggtgattaatgaaagggagtaagtgaacattctgtacaaatggctcactaaataatctaatttttcaaaggcagtaagagtataacagttagggtcccgcagaagatgagaaccaaaccctttctttttctattgaataaaattcataagaataatttttaagctgttcactaggtaaaaaaagaggaccctaaaataccacaaatgtggaaactgcagaaagccctagttttccagggaagctttaaaggcctagctttaaatgcaggaggcaaggaattaaaccttagagagggagatgtcctgtagcgctgaaactgttgttttaagagaggactggttggtcctggtgaccctggaaaggagacaatgaagctggttcttcaagtgttgagaaaactgcaaactgaattcgtgtgctgccatgggcaggatctgcacctgctggagtgagaagtgtgacttggggcgattatcctgggatctgcttagcatacaggaagtcccaaatggagcagaaggaaggaacaaatcctgccttcctattccagctttgcagttttcctctgtcaccccctagtagaaaagcctaacagaactgcggtcaaagccacagtgtgttttgcagagtacagaagggaggccttgaagccgagaaataggaacataatgggcacaaagaggaacttattctgaagcccacagctgcccaaggagatatccttggatctactgaatctcccaacaccaatctttacttccaattccttaacttcatggtctcatcatgaattttggggtcagagttgggtttgtatttctgttttttacttatgaataaactattgaaccgcctttaggtttgatttcctcatctacaaaggtaaggtaacagtatctattttacaggattgatgtaagtattcaatgaaattaggttaatatgaagcttacttagcttggggtataacatacggcagtagcccccaacctttttggcacgagggactggcttcatggaagacaatttttccatggaccagggaggtgggtaggatggttcaggatgattcaagggcattacatttattgtgcaccttatttctattattattatagtgtaatatataatgtaataattatacaactcaccataatgtagaatcaatgggagccctgagcttgttttcctgcaactagatggtcccacctgcgagtgataggagatagtgacagatcatcaggcattagagtctcataaggagcccacaacctagatccatcacatgcgcggttcacaatagggtttgcgcttctatgagaatctaatgccacagctgatctgacaggagacagagctcaagcagtaatgcttctggccagtggctcacctcctgctgtgctgcctggttcctaataggccacaactggtaccggtccactgcccaggggttgggggcccctgccttaatagattgctcctgtgcacatccagccttatagtttggtgggtagataacacccagctaagcatgagaagctcaggttgcacagtcattccattttttccagttcttgcccactagcaagccggaagtagtttatcaaaaggacagtagttattttcagaggagggcatggattttctccaaaaccttataagtctgacctgtaattcttctattgatgcttgccagaggctatatacggtgagcgtgtgttttccatagacacttcaaatatggttggatgtgctggattataaggctcaaatgaaatagcagcttgaattatagctgggacttttctttctttcttcttcttcttttttttttttttttttttttatggagtcttgctctgtcacccaggctggagtgcagtggcgtgatccgggctcactgcaagctctgtctcccaggttcaagcaattctcctgcctcagcctctcaagtagctgggattacaggtgcgtgccaccacgcccatagctgggacttttctttagagccttctcttgctcttgccctaaaacctagcagcattttgagttattcattaagtgggttgaaataacacactcaaatatggcatatgttgaccccaaaatacaaaaatgcccaccaagagttgtgcctttttagctgaagttagcttaaaatacagcagtttttctttcaccttggaaaggatatgtcagtgtgttccagacaatttgacttcaagaaacttcattgaggctgtgagctttttaatttttgtagagtttgtttcttgccctggagttcattaatgttttaccaagtcctctaaggtacttgttacttcctgctcatcaaatgtcaccagcaagatgtcattgatgtagtggactgttatgatgttgtatggaaagtcaagatgattaatagcatgagtatattaggacagagagcaggatagttgacatagccctgaggcaatgcttggaaggttactgttggccatgccaggtcaaagaaaagtacttctggctgccctgatacagagaaaaatgcattttcttgtcaatagctgcataccaggtgccaggggctgtcttaatttgctccattcaagatacaacatttgggacatcatctccagttgaggtcatcacctgaattcatttaaaataataatacataattgttctgttatactccagggtttatctgctttgtctacgggataaacaagctcaatggggagatggtaggtatcacaacccagctttttccaagtctctgataatggcacccatcttcaaaattttcccatcaatatagtattattttttatttactattcttgtatcaaggaaacttctgggggcttcaacttggcccttttttaccaaatgagctttattcctcagtgccaatgtggggattctgccagttgtcaaacatgattattccaattatacattcacaaattggggaattgtcctgcaggcccactgggtccactgtgattcaaacgtagaccaagattctaactatcatctggccaccaaaagtcaccacttttttttggaggaccagtggcatttgggtctctagaaattagtgtcaacttagtgtctaatagttcctgtgattggcagaatttcagcctccaaggcctctgagcccttgtgtcatgacccaaggtcatgtaccttcaaccctagggtcagtagctgcttcctgtagttgctacttccatgttcaaataattggcatggattttgtctcctcactagatgctgactgatagaaaagttgttaccaggagtggtcctggaaagtagaccttcatagatgggacttggggatgttatgtagcatgtctgctacataacaaaagggacatttcaaatgtaattaaggttactaatcagtggacttcaagatagtgacaatagcctgaattatccaggtgtgtccagtgtaattatatgtgccgttaaaagcggaacatttttttcccagctgacagcagaagaggatattggagagggaagtgggggtagggtaggaaatcagagattcaaagtataacatgaacttgacctaccactgctggtttgaagatggaggggactatatgaaaacatgagaaagaaatgaatcctgccaacaaaacaattcctggaagaagactgagcctcagatgaggaccagctgatactttggttttattcctgtaagaccaagagcaaagaatctcaccatgccctgctgtactcctgacccacaaaatctgtgagataatacatttgtgttgttttaggttgccaattttatggtaatttgttagaggagcatttggaaactaatacaatcccctgaatatctgagtatagatatcaaccaacattttaataggcttccccttaatttcattccaaggataccataataaactatctactgacagatccctgtgggtcaaagcattctggctaccactatatctctgtttctctttacagtgaatgtacagttgtctctcagtgtactgggtgggggggattggttccaggcctcctgcatatacaaaatctgcacatattcaagtctcacgctcagccctgtggagtgtttatgaaaagttggccctccatatatgcaagttttgcatcttgagaatactgtatttcaatcagtgtttggttgaaaaaaatctgcgtgtaagtggacccatgtaattcaaacaggccaactgcacttacttttactttggtagtcaagttttgtgacttagcttccagtgctctgagatcctattatctctactgaaatcaaggagagggagtatctccaccatcatatctaggctactgcaagagtcccccatgaatataaaatccttgagtgaaggcagttttctctgggacttttgggaagttacttggtgctgcgtatgtgtgcagtgtaacatgataaatcttctccaaaattcctatctccttaagtctttgattcctttcctttatgttatgtcaaaaaagtcctgacatctgagcatcagtaaacataggccatggttgatttcaagtttaaacaaacaaatcaaataattctttgtacaaaaaatttacatccagaatctttaagtgtaaccacgtcatttaggcattccatataagcaacttccccaagtgagactataagagtgtcatattccatcttctttggtttactaccccaaaaatacacttacacatattcctcaggtttctgctaatatataataatacaataatgttttttaaaaatacactttatttccagagtagttttgagttcacagcaaaatcgagcacacaggtttcctatataccctgttttcacacatgtgtagcttcccccattatcagcatcccccactagagtgatacattttttacaactgataaatctacattgacacataatcacccagagtccatagttttcatttgggttcacttttgttgttgttcattttatgggtttggataaatacataatttgtacccaccttatagtatcatacagaatagttccactgcgctaaaatcctttttttgttgttcctattccaccccttttaccccaacccctggcaaccactcatttttttagtctccatagttttacttttttcagaatgtcatatacttggagtcatacagtatttagccttttcaaatggcttctttcatttagtcatatgcatttaaatctcatctatgtcttttcatgacttgataactcatttcttttcagtactaaatagtatttcattgtctggatgtaccacagtttatccattctcctactgaagggcatcttgattgttttcaagtttgggcaattatgtataaagctactttaaacatccatatgcaggtttttgagtggacatatgttttcaactttttaaggtatataccaagttgtatgcttgccagattgtatggtaagaatatgtttagttttgtaagaaaacatcaaactgtcttccaaagtggctgtaccattttccattcccaccagcaatgaatgagaactcctgttgctccatattcttgtcagcatttggtgttgtcagtattctggattttggcctattgcatgttttttcatgtatgagctatttttcctggatcatacattgtatttgccctatggagcatctgaaatgtgatcagaaatacaggactagtaggaaaaatttatagttatggtggctattcagcacaataggcattccatataagtacatttcccaagtgaggttattagaggattttccagcagtggacagctgttctcatcagactcaggagggaaatctatttttactggtagaggaggctcagaatgacttggagattcaagatcttcagtcccctttgagttcagacagaaatccttatgccaggtttcaattctaaaacttcttctttatcaattccctaactttcacatgacagtcttgttgaagctgtgaattcagcttaactttcaattatgcaactcacacaattaaatttagttagtgtttaatatggggcagtatcagtcctgtggctataacaaacaagttattattttagggctgctgctgaatcttttctgtatctctgattatgacctgacctgagatattaaggtcttgaatttgccatttttctttctgaaagcacacagtacactcagaagacatcctccacaacaatgcttataatcatcatgactgtcttaatagtcaagagcagcagcaacttgagcccccaagccacttatttcaataggtgctttatttaaacaacaaaagtaataatggtgatgttattgcatgcaatgcatttcattttttattggcaaggagtttaacactgggttcaagctcagggactttaccaaagcaatccccaagtcccatctatgaaggtctactttccagggccactcctggtaacaacttttctatcagtcagcatctagtgaggagacaaaatccatgccaattatttgaacacggaagtagcaactacaggaagcagctactgaccctagggttgaaggaacaaggaagagttaggagttattaaaatgtgtaagtttagaggctgggtcctgcagaactgacagtcatattttttcttgacatattctgatggctctgaacttggaggatagtcccagtggacctgactcagaattctgaggatggggtgctggctggctggagcaaggcctaatatggagagctggaaaagcaacaatgtggcttgcagatttcatcactaacatcataaagctgagtatcgtagggaggatgtggagttctgagaccacaacttaaccagcagcacagagtaacttattctgaagcccacagtctctgaaatagccgtctttaaatcttacaaactttcccacacgtttctttatatctattttcttaatttcattctctccataaattttggagtcagacagagttgcattcagatttcagttttgtttctaaacttatgagctatgtgactgtaagcaagctatttaacttcttttagacttacttatctacaagccaggatcacaatatctatttcacaggatcagtatagatgttatgtgaagcaaagttcgcatgatgtgtacctggcacatgcacagcatatggtactaacaaggccacgctggttcacctcctttcccttcaggtgtgtcttctccatcactcttcctccttttctttcagcctctcatacctagcctttttcactgtgtcttctctctgtcttttctcctatattttgttctcttctcccccttttcattcttgtctccatccttcgataccttaattcatcttgcttcatccctttcgttgtccacctacccttacatggccaatgatcctcaataaaagaaaagctcccacatttgctttcgacttggaaatatgtgtctttttaccattacttaactttttaatgcactttatgtcttctttggtgtcatatataggaaattgccattttgagagcttgctgcagtttattgcatagtgtaatggagtgcagtagcatgatcttagctcactgaaacctctgcctcctgggttcaagcgattctccttcctcagcctcccaagtagctgggactacaggtgtgcactaccacgcccagctaattttttttttttttttttgtatttttagtagagacagggtttcaccatgttgcccaggctggtctcaaactcgtgagctcaggtaatccactcacctcagcctcccaaaatgctaggattacaggtgtgaaccactgctcttggcctcaagtagacattcttgaattataagcagttaaaccaggtgatgtacaagtgaaaacaaagacaatggtttctttgcctagtatataatatttattaagaaatgacagaagacattgtatcacagatataactgaaatatccagcaggcaagatcattatgatccaaaaaccaagggatggatcagatgttaaaatgtggaaagtccagcctacttcttagaagctgaatgttgggtgatgagcttccattctctctggtgacttgaggaatgtcacttggctataatttggtgtctttgatgttgcaaaaaattttaggtaaacaagataaaatagattataaagcatggaaacattagacttgtggatagttctcatggataaattccacaacatgtcagtaatttttaatcctgcagaaatatcagaaatagtatatcccaagcaaattgatgatcagcaggtggctttgtagcatttctgtgtccccagtgaagggtcaaggtattcattgtagaatggaatcagatagaattgtgagctcatatacttagtagtctccatcacaagcaatgcaaagtctgagaacttgttagtggtccagaggtggtcaagggatgaacagttcagagacactgtgacctaggcaattgaaaataagcaaactggctttcagcaagtgggctcacagcagcagactgggcggcagcaggactgtccacagtaggacgggcggcagcaggaggcctgggcatggtgcagttggcagcaggatgggggcgtgcagctcaccacacagcaggggggtaggtaggtgccctccacacgactgtctgggcggcaccacctgatacgggtgctcacagctccactgctgccctcctggccatagctgatgccaccaccaatgccacagccagttccgcaggagctgatctggcagcagcttggctggcagcagctggtctcacagcagcttggctggcagcagctggtctcacagcagcttggctggcagcaactggagctgcaggtcccactggttgagaagctgggaaatccgcagaagctagtctggcagctgcgtggctggcagcagctggtctcacagcagcttggctggcagcagctggagccacaggtcccactgatggagaagctgggatatccacagaagctggtctggcagcaggtcatggtgtcagaagttgggttaagagttaggttgcttggaggagtttctgaggtttggtggtgacttccacgttggtccttttatatatctgaaccagctgctgtttacaaaattgttaacatattttctttgtttttgtttaaatttgttactccgtggatctctgattggcttatgttgaaatacttgtgacacattatgagcaatagtttagaaattactgttttatagtttcttctggactcctcatatcagtcctttgctctttggaatatgtttgtggtttcccatgttcaaagagtacttccattttagtccaaatgaatgctctcattttacataatagttattccacgtgacaatctatccatacctctaaggctaagagtaataattgtgctgttatatttaactattattttttcctcctagatatatagactaaattttattgaattttggatatctggatatctactgaactgaaggaatacctttggtcatacataattcgcagatttcacctttttttgttccaatgtcttattgaattaccgattatagttcctttgatttcaaccaatttggaatgtgtgactattattcctgttccagaccagaaatctgttcttgggaaccaaactgacatagtatttaggaaggtatccagcagagtccttagtttgtggtagaaccttaataaatgtttactgaatctgattcaataaatgtttattgaataggtggagtaaaaggcttgattcatggatatcaataccactcaaacatgattaaagagaactttcaagctgtagtacttctcatgaaagagtcttgttatttgctgtaaagagactaggaaatgtgttttttggtttattttattttattttttggatttagtagtggaaccgggctcgggaaaaaatatctaggagttatgacactttgaaaaatgtactgccatctactttattcctcttggaaattgcataattttgtgtgtaatccatcattgctaccaattaaatatagaggtaagttctgggagcttgtaaataatgtggaaaacgtgtttctttctatatttgcatcctattgtattttgtgtattacactctaatgcctaatgaagaatttaaaaattaaatggtaaaatatgttttgttttgttctaggttgtgttaatttttttttttgagacagagtcttgcttgttgcccaggctggagtgcagtggcgtgatcttggctcactgcaagctctgcctcccaggttcacgccatactcctgcctcagcctcccaagtagctgggactgcaggcacccacgaccacacctgactaattttttttttgtatttttagtaaagactgggtttcaccatattagtcaggatggtctcaatctcctgacctcgtgatccacccatctcagcctcccaaagtgctgggattacaggcgtaagccaccgtgtccagcgtgttaacttcttaagagaatatcttttaagttgggttgcaaagtgcaaaatataatcgagctgtttcagatttctaacacttctgtctgacaaatggcaatggtagaactcagcgggtgctctctatagctgtttcttctactatcatttagaccaaagatacaccttatgcatacgtacatcaaatgaaggtgaatagtgggagttgaagcttagagagcaattcaaggatcagtgggaagaatgtgaaaggctaaggtgtagaaattaaacctaaattctcttggaaaataggtagtatctagtagctatttttaaatctatttagaaggtaatgcaatttctttagattttggggcataaatgaaggagaacatttagtatattaaatggaaggagacaaaagatggtagaattacatttagatagaaatcaatagctttgatcaaccttaacattttagctaaaggtcaacctttattggtctagacctaatcataatagattagagcatgtaaatatttgaactataaaaattctttaattcatggagcatttttaagctgatggattcaagcataatttactttgtatttaatctttctggtttagactttatggttatgccttggtattattatcaaattgcaaatccactcttgaataccagctacaagaagacatgtttaaaggtagaaggaggacataactcagtttgctttgcacattaaaacattttatttggattaatcagagatattcaaggaaaaaccaggtctgaagatgcatgagcatcaagagagagttgggggagcagagatgtcactgaaatgatgaactattccatcctggtcctctgctcaagcaacgcaagctatccagaacactgattgatacatctttcagtaagtgaattcggcacatccacagtgtcctaactaggagtttcattatctctgagcagcttaacaacatcatggtacttagcatccaagtaaaatcgaacagttcttcagaaatcagcacaattttgctgtgcttcccctttcattcttaagcgatcagcaacctggcttttagcaggtgggctcacagcagtggcagcagcaggctgggcggcagcaggactgtccacagtaggacgggcggcagcaggaggcctcggcgtggtgcagctggcagcaggatgggggtgtgcagcttaccaggtagcaggggggcaggcaggtgccctccacgtggcaatctgggtggcaccacctgatacgggtgctcacagatccaccgctgccctcctggccatagccaatgccaccaccaatgccacagccggttccgcaggagctggtctggcagcagcttggctggcagcagctagtttcacagcagcttggctggcagcagctggagccacaggtcccactggtggaacagctggccatggtgtcaggagttgggttgagagctgtgttaagagaggtttctgagtttgggctgtaccttctatatctgtcctttgatatgttccctagagctgcatatttacccaacaccttttcttgatgtcaatttcagtgtgagtctctggctaatacctgaggtgtttataaagttataaatagcatttcaatagcctttttccattgtacaattaagtctcattatgtttcttctttgccctctgggcgaagtgaaggctcatcatggaagccaagcaccgaagtgcctctttatgcaagtcacatgacagactagccttgagccaagtgtcgccctggcacgttttgtcatagttgtcctttgataacctttaggcagaatttatcttaactgatcatttttccttaaatggtcacttaactatgatcatgattttataaacaatttgtccagacttggaaagactaacattagtgtcatcaaaacatgaactacaacctgatgtatcaactttcaaaccaagtatgcctttctatgatcaatttgtgcaagttataggatcctcagagctctatctaatattcttgccttcagtaatagtgaatgtacaaattgctaactaaaatctttaatgacttttgcttgtagattgttttctgactctattaaattaaacatatgtgctagtaatgagtacacattgtaacaagtcaaagagtacagaggtatataaagaaaaattagtgtcttttcccttcctggaagatgcacacatctcttccaaaactaatgctctagaggtaatcaatattaagaatttggtgcacattctttgacacctttatccttgcttctgcaaatataaaccagcatatatacatatatatcttctatttcagaaaagtttgggtctcctacacatgtttatagttacaaatttttaattgtggtaaaatatacataccataaaatttatgaaccatttacattaaccatcttaaccatttgtaaatagtcttgtcacccttgttgaaaatcatttgaccacattcacattcagaagaaatgaaattagaccattgtctcacattatatacaaaaaccaacttagaatggattaaaagactgaaatgtaagaaagactcaaaatgataaaactataagaagaaaacagaggaaactccatgacttttgcctggccaatattgtgatattgtgaacatgaatccaaaagcatcagcaaaaatagacaagtgggattacatcaaactaaaaagcttctgcacagccaataaaacactaaactgagtgaagacgcaaaccgctgaatgggagaaaatatttataaaccacatatctgataaagggttaatatccaaagtatagaggaaactcaaacaactcaatacctgtagtaagaaaacaaataacgtaattgaaaaatgggcaaaaaatctaaatagacatttctcaaaaaaaatctacaaattgccaacaggtatatgaaaaattttcaaaatcaccaatcatcggataatgcaaattgaaaccacaatgagatatcgtctcacacatattagatagttattatcaaaaagacaaaagatagcaagtgttggagaggaagtggagaaaagagaactctggcacactgttggtggaaatgtaaattagtacagccattatggaaaacaatatgaaggttcatcagaaaattaaaaatagaactgtcatataatcaagcaatcccacttctgtgtatatacccgaaggaaagtaaatcagtattttgaagagacatctgcattcccatgttcattgcagcattactcacaatagccaagatatggaagcaacctaagtgtccatgtccatcattaaatgagtggataaagaaaatgtgatacacacacacatacacacacacacactcacacactggaatattattggtcataaaagaaggaaatcctgctatttggggcaacagattaaacttgagaacattatactaagtgaaataagtcagacaaagaaaaagactaatattgcactttctcacttacaagtggaacttaatgtaaatgacaagttattgggtgcagcacaccaacatggcacatgtatacatatgcaacaaacctgcaagttgtgcacatgtaccctagaacttaaagtataataaaaacaaaaaaacctcaaaaaaaagaaaaagttgaattcatggaagtagaaagtagaatggtggttaccgggggtagggtggtggtggagtgtgttgggaagatgttggtcaaaggattacaaaatttcagttagataagaggaataaattcaagagatctattgtacaacatagagactatagttcataacaatatgttacagtcctgaaaattgctaagagagtagattttgtgttttcactacaaaaaaacttatgtgaggtaatgcatatgttaattagtttgatttagccattgtacgaagtatacatattccaaaaaaatgtgttgtacacaataaatacatataatttttgtcaattcaaataaataaataaatgaactcatttaaccatatgtgtatttgagggtttatttctaggctctctgttcttttccattgctttatatatctgtctttatatcagtatcacactgttatgattactgtagctttacagtaaattttgaaacaggaaaatgtgagaccaactttgttcttttttaagattgttttggctatataggaccccttctaatttcatatgtattttaggatggatttttttaaaatttctgcaaaaacatcattgggatttttatagggattgcgttaaatctgtagattctctgggtagtattgacatcttaacaatattaaatcctataatccatgatctcaggatgtcttttcatttatttgtgtcttctttaatttctttcagtaacattttgtagtttctggtgtacgagtctttcccctccaaggctaagtttgttcctaagtattttattctttattttattattattattattatttgaaatggagtctcactctgtcacccaggctggagtgaagtggcacaatcttggctcactgtaacctccacctcctgggttcaagcaattctcatgcctcagcctccccagtagctgggaccacaggcatccacgaacatgcctggctaatttttgtatttttagtagagacagggtttcactatattggccaggctggacttgagctcctaacctcaggtgatctgcccacctcagcttaccaaagtgctgggattacaggcatgagccaccatgcccggccataagtattttattcttttgatggaattgtttttaaaattttccttacagatttttcatggttagtatatagaaatgcaatttattttttttagtagagatggggtttcaccatgttggccaagctgatctcaaactcccgacctcgtgatctgtctaccttggcctcccaaaatgctgggattacaggtgtgagccaccgtacccagccagagattttgatttctgtaacttcctggttgtgaaagcactgtgtaaggttaagttatggtaacagagcctttgccatttctgaggccctaaataactacacttactctatgtttttatggtcattaacctccactggacctctggataacaaatttcctaatgtggtattagaagagaagggatatcaaaagcagattaaagtttttcatatgacattctatgaaatatacatcctgagtacactcaatgaaaaaaaaaagatatgtttgttgcaccaatagttaaaatttattagaccttggtatattattcctctttcatagggggtgcaatttgcaggacggtgggatacaggaagtgagtgtcctgagaaggacagatggctcttccatggtctcgtcggcgctgagactcagagcgtgggcttcaatgcttgcaaaggctcagtttcaaggtaaatcggctttttcatttcttgggtcaaatttgtattttggcgtcctcagagagaagagtaaggtctttctggaattgaaaggaatcagataattctgaggccaaaatatttggtaacccccataagaaagacaaagaaaggttgaagaatttgttcgttgtccataagtgcttgaagaaataattcgttcatgaatggaactgaaagtggaaatttcaagttgaaaatcagcaaactggcttttagcaggtgggctcacaggagtagcagcagcagactgggcggcagcaggactgtccacagtaggatgggcggcagcaggaggcctcggcgtggtgcagctggcagcaggttgggggtgtgcagctcaccacacagcaggggggcaggcaggtaccctccacacggcagtctgggcggcaccacctgatacgggtgctcacagctccactgctgccctcctggccatagccaatgccaccaccaatgccacagccagttccgcaggagctggtctggcagcagcttggctggcagcagctggtctcacagcagcttggctggcagcaactggagctgcaggtcccactagttgagaagctaggaaatccgcagaagctggtctggcagcagcttggctggcagcagctggtctcacagcagcttggctggcagcagctggagccgcatgtcccactggtggagcagctgggatatccacagaagctggtctggcagcaggtcatggtgttgggagctggtatgaagtctgggttgcttggaggagtttctgagttttggtgatggctgccacattgggccttttataagcctgggccagctactgtttacataattccagaagtctcttgcttatttgtgttggataatttgtctctgaatgataattggcctctccctgaattatttgttgaacctactgagagcctttgaaagttgattgtatttggtctgcaattaggcttctttaccatggtcaagaagtcattggcattaattaggaatatgatccctaactcctcatgtttcttaaaatttcctcatggtcaaggaataattgactgatgcctcacctttaaggattgtcaatattactcagtgttgacccttacaactgggtgattgggtctcacatgacagtttaattccctccaattttaactgtggctccttctctaactttcttatcttccctttgactgtgaagcaagactatattcagctggccagaaagggatgctttcttgggcctgggagatttgcattaattgctattgataacattttcccatcactgattatgtgcctaaatagttctgagtacttcgcatgtatcaatttgctgaattttcacggcaatctatgggctaggtatcactgccactcccatcaaccatgtgagaaaactgagccacaacaggttgaagtaacttaccctagttcacactagtatctagtgaatctgaaatttgaatccacaacctctgattccagactaaactctttaaacactatagtcaattctttctctctttctctctgtctttctcccttccttccttccttccctcctttcttctttctttctttctttctttctttctttctttctttctttctttccttctttctctttctttctttctttcctttctttctttctttccttccttccttccttccttccttccttccttccttcctttctttctttctttctttctttctttctttctttctttctttttcttctttctcctttctttctttcctttcttctttttttatgtaaaaagtcattctaaggaaattccaatggtgaaagcaagccgtaaaaatttgcttcctttcttacggacttttttgagagtaaaaggaaggaagggagagcttagggtaagtaataacacagtttactacagccattcctagagattttatttatttattaacagcataataagcacagttcaagaaaatcttaagtgctaaaaaagttaaccttcttgtgactttgtctcatcttttatcttaggatattctatagatttagattttttaactgcataaaattatagtttttaacatattaatactggagtatgtgatttactacagagtgttagatcggctgtatgcagtttattatagatattagagactaatccagtgaactggaaagtttatataatttgaatgagacagctgatgacggtgaatataaaggttttgtttagatgcaataaaaggtgaccaggcctccatggagtatgggttcattactgagaaatgcaagttacgatgctactcttggattttgaaccagaacaccaagtggtagttctgcttctctagaaatgacagctttgagtttacatcataactctttctgagtcagaattaagacatattttcaaatcccacatcaaatttggtttaaaagatatgattctttgtgaattccttgcttcttcttaagcaaagctacatcacagattctttgattagctaatattttttatgttggatgcttgaaatacgtgggtgtgtcatgacaacaatctcgggagctatttaattcagatctaaatttagcagaatctttgatactaaacagatgtatctccttttgcaaaaggctcagatatctgaggacctgaaatacattattgataagagcactggagacagtggcgttgcatatcagttctccctttctgggcttttctactgtggcactattttcaacatcttcctcaatgcaaaatttaaggtatgacacttacttgagaatttgactcctgtgccacagaacgaagactaatctgaacattcccttacctcctctaagtaaattaagaaaatgaaatttattttatttcactttacattatatccttcaagtttaggtatgttgtaatatgtgaccgaatttcctgctttttatagactcaatagtattccgttgtgtgtatataccacatttcttattactgtgctgattccctctggcattcattacttcatttaagtgatgggctgtagaccattccagtaccataagaagaaagaatgtgtttgtctgttattcctgaacgtggctttggtttaacacagacactaatgtttgaaattatttttctttaagatatcatggttctggttttctagttacaagttctggggattctcccaatttcttcatctccgttttactagttctctaattcggttgtgactgccttacttagattctcgagaaataaaacatgattgatgtaccagtcaaatgaatacaacattcctatgtagggcttctgtgcttctgctctgggcttccatcctagtaatctagaccagataacacataaacttcaaggacctcctcttactaccaacttttatcctaagccaagtcacaagatctatctcttccctcctgaatgccaaccaggattttttggggtgcttctgagccaaagtccttttaattaaaaggtacatccaacctaaaccctctcagagacaacagagctctaaatgaggggaataaaatgttgactacattgtagggccattgtgtatagatgtacaggtcgcgccctgatgtgtggctctgtccactcagaggaaggagcatattatttcttacatcaagctggaggctcaacaaactgtgcactcctctgtctgtatcttctccaaagtggtgccttttcctaattcttttaaagttgtgctagcagaggtcctgttcttttgattttttaaaatggaggttaaattcacataacctacaattaaccattttaaagtgtataattgagtgacatatagtatatttataatattgggcaacatcatctctctctagcttcaaaaacttttccatcatcgcagaagaacacccccatgacctttaagcaatcacttcccatacccctctacccccaggcactggctcaccactttgatttaatgacaaaagattttatcccttggaatgaaagcctcactatgcgtcttttatttaatgcttgcttcatctagaactctctctgaaaattagaataagaacagtgacagtatttaaatccatccttgcagtgaacatttattttctgcttcacaatacataagaagattatacaggtattataaaaacatcagttgatactccctttcatcatttttcaaagtatattttgaggagtatttgtgttacagggtgttaacaggtaacataaaaatagagagttttctggctaagttagtttgggagtgatggttatagagttgttttttttttcttttctttttctttttttttttttttgagatggactctcactctgtcacccaggctgtagtgtagtggcgcgatcttgtttcaccgcaacctccacctcctggattcaagtgattctcctgcttcagcctgtaagaccacaggtgcccgccatgacgcctggctaatttttgtatttttagtagacacggggttttgccatgtttgtcatgctggtctcgaacttgtgacctcaggtgatccacctgcctcagcctccggaagtgctaggatgacaggtgtgagccactgagcccggccactggttgtagagctttatttattgcaggccatctcagtccctttaatattccagtgtggctttataaacttgcaaaaaggtgataaagcatacaacataatttgaccactgtatattttttcctctttgggcatctgaagctattactggtcagtgtgtagcctgtttaggaaattatctaccctcttatgcctggaagggatgttgtcagtaatgactcaattctctcatttcccaaattagaaataggtacccaggcaagtgaagggacttgctcaaggattcatggatagctagttacaaagttgggactagaactcaggagtcttgatttagctttttgttcttctacccaatagcataagctatttttacatcttatgctattgggtagaaggaaaaaaaaacacactcaaatgttctttctactctctcactcaacaacaatcaacacagaagatttctgtggctaatgtgtggggatttctccccatcaagaagcaaggaaataaattctgcagcagataccagctgcatgttttccactccaattccattctaacgctatttacttggtgatagtgtcaggttttacagggggagggctcagttctgtaagactgccccctacttccagtgccaagcacaagctccaggttgttttgcctgtgcttctgaccaaccagccataaattgggaattccatgacaccctcaagtttgatgaatgtgctagggcaggtcccaggactcagggaaacatttagcttattggtttattataaagacaattacaaatggcacagaagaagagatgcatagggtgaggtgtgggggaaggggtatgaggagctttcataacctctctgggaacagcacattccaggaacctccacacattcagctatctggaagctcctcaaactctgtgggtttttttttttttttttttttgaacattttacggggacttcagtggatgggcatgatggacaaccattagaaacgtgattggacaaaaagagtatgatctaatgttagtagagtgagtgatgaaacctgtctgtcagatccttcttggtctctctatgcagccttccttcctccagggcatggggcagaacctcttctgaaatggggatcttatgacctacaatcaggcaaggtaggtaggagaatatcttgatggccagtgccaagaacagtgggggaagattcttgccttgaggagtaaaaggagcaggtgaaaagaggtggggagaaggccagagagagagagagagcaagagcaagtgagtgagcgagagcgagagagagagagattctgttttctgaggcctgcttctgaagtgtaaagtgccctaacatcaataaaagggctatgggagttatgagcctagaccttgaatgaaatgtgtatattcgttacatgctattactctgtaatcttgtgtttgtattctttcacaatttttattatgcttttgtatatcttggaggacagaaataattgtatacaacctcatatatgaatggatgaatgaatagatttggcaaaacctcaagaagctgaatcaatctgttggaatacctagcccaccactttgcacatgagaggaccttaggaaacagttcctaaatgttgtcaagttcctttaatcatatgtcttggctgcaaaatattggaccatttaatggtaaaacaaaggaaaattgctgttaaatatcatcattaaaagagcaaaagtacagaaaaaccatagtgtcatgtcatgttgatattttgaaaaatcccagtaccccaatattgttaataaattccaaagcaaagaaagttcaaacaacaacttcatcattgaagagatgaaaacttttattaaatttaagtcccaataactgttgaaatatttcaggtgatatttatagtaaaatagtatctaactcttttcacattgtaggactttggctgacaaccaggtctaggaaaaatttttggtcttccattgtaaatgaatttacttcctagggaatttatgtggctgtgtgatgagaggttgcaagcccagttataggtactggagttcagaagattgttaggattctaatttggctagttttaaggtgccatcttatcaggatccccagcagaaggaggttttcaacaagtgggctcagagcagtagcagcagcagactgggcggcaacaggactgtccacagtaggatgggcggcagcaggaggcctcggcgtggtgcagctggcagcaggatgggggtgtgcagctcaccacgcagcaggggggcaggcaggtaccctccacacggcagtctgggcggcaccacctgatacgggtgctcacagctccactgctgccctcctggccatagccaatgccaccaccaatgccacagccagttccgcaggagctggtctggtagcagcttggctggcagcagctagtttcacagcagcttggctggcagcagctagagtcacaagtcccaccggttgagaagctaggaaatccacagaagctggtctggcagcagcttggctggcagcagctggtctcacagcagcgtggctggcaggagctggtctcacagcagcttggctggcagcagctggagccgcaggtcccactggtggagcagctgggaaatccacagaagctggtctgacagcaggccatggtgtcaggagttgatctgaaggttgggttgcttggaggagtttctgaattatggctgcctattccactgccggctttttataagtctgggccaattcctctatttgtggcgagcaacatttttatcttgttactctttaaaccagcctttctagggccctctgatggttcaaatgctgaattgttttaaatatatctcaaaattgatttttccttattgctcagctaatactcaccaaatgtgtttgtccttggtaaaaatgttaacattttgtttacaaacaatggtataatttccacttgagcttcagcttcaggtttgcacttgtgggtatatcacctgacaaagtgactctcacccataaggtgatgtgattttggagatcatattcaccaaacctcaggtctccagaaaagaattattaatcatgattgcccttatgtaagactgctttgtattttttagactaataagattatcctctctcgatataatcttattagccagatagaaactctgataaactctatattcatagaaattcatagatttttccctgaaatggaatctttccaatttctgtgatatctcctgaacttcacattcatattttaggaaacattgatcactcaggaggatatataaaacaaaacctgttcaatttcaatgtctcttaaaaaagaggctaaaattcatattcagtaattggaaaaaattgcaaaatattttaacaaaatttacacttctctatgaaagacaaaaatcacttgtatatggattatctggcatataatttttcaaaggcagaatttaattttaatttatgtcatttcaagttactaaaccatgtgtcctgtgaaaagatattagaccaaagagcatgacaactgaatttaggaaagggaataaatcaaagaaaaagcaagagttagaaaatacttttatctgctttataaggcaggttagaaaatgggtgaccaaatatagttcaagaggtgtagtataataaatgcaaagagattaagaaaaatttcagcaaaataaaagttaaaacaattcctggtcattgccagaagaaagaatgtaattttcactgggagtttagggttacgtgagataaatgaaaaaaggctggtcaaaaacatattatttctacttggggtaggtttatttctcccttccaatcatgaatagaaacacatagttagctttttatgaggtggtggcatttgtttgtacaggaatggggttatatcacaatgtgattcatgccagcttcagtaaagatgttcacgtcatatggtaaccatgactgtaggtatgaagttgaaaatggttatatgtaatcaatgaatgttggagatcaaaaatgtagtaaattatcttgttccaccacttaattttataggtgtagaaactgacatcattcttattataaatagcacatatttattaacttctactatgcccagagcactaaaggcttatacagaaagcaagatcccatctatttgttttgtatcttgctctagtataaaaatcagtgtagtagcaataggagggattaatcaaggaaaagagttgagtatagaaccatttagtctcaaagttctaaatgggaacattggtgatgtgctatggagcacttttcattttcacttaacatcggctgatgttagaatactcttgagtcttgaagaggttaagtggcttgttccattcacacagtacacaaccagaagagctgggtataaaattcctatcacttgttcctagaccagttctttttattttataccatgctgcttttcagaatcaattaatgttagtaaggctctttgtctttgtctttttttctaaaaaaaaaaggtattttgtaatagcacaagaatagaaatattagatggtagagagatggcactatggagtagtgattttaaatacacaataaataagtacaaatatgttaaagttcttttaagtatctggaccagagacttataattggaataagtcacatttgcctcctagttgttttttgtttcccacattcaactaagttaatatactttctgggtttctacatctgctatactcattgtgtcttctttattccatgggtattatcttagttgagctcttattgtaatcacttgaccaaggcaatatcttcctgattagtttctgtatagttctgtacgactcatttctctggcctttgacctctgtctttataaggagctatcatgagaattgtcccaatgccctgctcttgttatgccattttcctgccccaaagctttcaacaactccttactgcttattgcattaagggtgtactccgttggctagtattcaaagcatacaaattttccaaatctttctttcattatcactctatatatatccagtgcccccagccaaaccgtactctgaacaaccctatggttcccctccctccacacctttgctcatactatttctattgctgagaatgccatccctgtgatctggacaccacaatctgaacctatataaaatgttagcttctcttttcaatctttcttattttccccaaccaacagtgacttctgtgttgacaccacacagtgttgtacttttattttttaatattctagtttttagatgaattataggtgaatatgactcatgtctctagaatctttttgaagatgggaacatttttaattcaattttactttctattttataccatatagcctgtgacttgcatatggtaggcaagcagcacatttagaccctatttcttaactcatttaaaaacaacccaaaatggattaaatacttaaatataagaccacatataataaaacaactagaagaaaacccacaggaaacattttatgacacttgtctgggcaatggttttttcttggggggataagacctcaaaggcacaggcaacaaaagtgaaagtaaacaaatgggattatataaaattaaaaccttctgcacagcaaaggaaacaatcaaatcagcagagtgaagagacagcctagagaatgggagaaaatattttcttttttggtacttttttttttattatacttttaagttctagggtacatgtgcacaacgtgcaggtttgttacatatgtatacgtgtgccatgttggtgtgctgcacccattaactcatcatttacattaggtatatctcctaatgctatccctcccccctccccccaccacacaacagtccccggtgtgtgatgttccccctcctgtgtccaagtgttctcattgttcaattcccacctatgagtgagaacatgcggtgtttggttttctgtccttgtgatagtttgctgagaatgatggtttccagcttcatccatgtccctacaaaggacatgaactcatcattttttatggctgcatagtattccatgtatatgtgccacattttcttaatccaatctatcattgatggacatttgggttggttccaagtctttgctattgtgaatagtgctgcaataaacatacatgtgcatgtatctttatagcagcatgatttataatcctttgggtatatacccagtaatgggatggctgggtcaaatggtatttctagttctagatccctgaggaatcgccacactgtcttccacaatggttgaactagtttacagtcccaccaacagtgtaaaagtgttcctatttctccacatcctctccagcacctgttgtttcctgactttttaatgatcaccattctaactggtgtgagatggtatctcattgtggttttgatttgcatttctctgatggccagtgatgatgagcattttttcatgtgtctgttggctgcataaatgtcttcttttgagaagtgtctgttcatatccttcacccacttattgatggggttgtttgtttttttcttgtaaatttgtttgagttctttgtagattctggatattagccctttgtcagatgagtagattgcaaaaatttgggagaaaatattttcaaactatgcatctgaccaggggttaatatctagaatatataaggaacttgaacaactcaacagtgaataataataaaaaatccaattaaaaataggtaaaagacctgaatagatatttcacaaaagaaaacatacaaatttccaacacatatatgaagaagtgctcagcatcactaatcatcaggaaatgcaaatcaaaaccgcaatgagataccatatcaccacaattagaatggctattatcaaaaatacaaaaagataacaaatgctggtgtggatgtggaaaaaagggaactcatacaaggttagagggaatgtaaagtagtatagccattatggaaaacagtatggagggttccccaaaaattaaaaataggacgatcatgtgatccaggaatcccactactgagtatatacgcaaaggaaatgaaatcagtatgttgaggagatttctgcacttccatgtttattgcagcacgattcacaacagccaacatatgaaaacaatctaagtgttcatcaatggatgaatggataaagaaaatgtgacacacactcacacccaaacacacaatgaaatactatcagccatgaaaaagaatgaaatactgtcatgtgcagcaacatggatgaacctgggggacattatgttaagtgaaattaaccaggcacagaaagacaaatagcacattcactcactcctatgtgaaatctaaagaagttgatctcatagaagtagagagtagaatagtgactaccagaggctggggagggtgagaggaggggaggataggcagagattggtctacaggtacaaagttacaggtagataggagggataagttttggtattctaatgtacagtagggtgactgtggttagtaatattttatcatatatttcaaaatagcgatcagagaatattttaaatgatcttaccatgaagaaatgataaatgtatgaggtgacgaatatgctaaacaccctgacttgattattacacaacgtatacatgtatggaaacattacattgcaccccataaatatgtacaattatgtgtcagtttttttaattaaaaaattaatttaatacaaaatattagaatgagtaaataaaaccaaatctttttgcaaggccaaagaacagatatttattagaaaataaacatgccacgaaatcttaagaagaaggaaattgcttcttttacagacttcagaatggcccaggtcttaatagatgagcccagtgctcggttccctgcttggttgatgtggggttttgtgggctcagggcaggaggtttgttaaagtagagaaatgggagtgtgactttttcagaaggtgagttacgcgttccgggcagtcagtgcactgctcagcaggaggaggtcctgcaggtggtgctgcaaggggtcggctggccgcagggggactgcacagacacaggctggcagcaggtggtggctcagcaggaggaggtcctgcaggtggtgctgcaaggggtcggctggccgcaggggggccggcagcagggggactgcacagacacaggctggcagcaggtggtggcccagcagcagggcctgcacaccacagccgtgcacgacgaggggcagcaggtgatggggcggcagcagccttcctgcagggagcaggggtcgcagcacaccgggcggcggcagggctcgcagatggggcgcgtgcagcggggcacgcaggtcacggggcggcacacggtggtctggcaggtcacggggcggcagcagcaggggtcgcggcagcagcagggctggcagcagcctcccccgtagctcagggaggagaaggtggagccgcagcaggagccggtcatggtggtgtctgaggctggtgtgggttgggctgtggagaggagctggatgttctcaggtgtgaatgtcctcctccccctctgggccctttatataccctggccgggtgcaggtgacccttttcgtttaccttttggccaattaagtagaattttgttttgactaatggttgcttgtgacacactcattatctcactaaagagctcttgttttatctctaagtatggatgtactcacattgggtgaaaatctaagaactcatcgtcatttgaggtgatagtagctcttgatgcttattttgagtagataacactggatcaaatctggacaaaacggtctaaaaaaacttcagtttttaaaagaaattaaaaacatagagaagtacatagaacattgagtagagcctatcctgaccccaataggggactcaagtccttggaagcacctacatgtgaaacgtgaatcacacgagtgttagacaagccctcccacgtagtctgcttgggaatacgtttgattatcacttgatatagtgggatacataggccttgaataggatagcagctcatagagttgtacaggacagacaaaaatttttgcaaaccactaagtgttggaataaaacctccaagactgccttgcatgttttcttttctctagttcaggttctgtgcaactctggtctttctgtcataagatgctgatttttatctctgaaacatgtcattttttagcgttgcctttcttgtgcatgtaatgaagaattctgtaatgggaaatttttctgaatataccttgttggccgggcgcagtggctcatgcctgtaatcccaacacctggggaggccaaggcaggtggatcacctgagctcaggagttcaagaccaccctgggcaacatggtgaaacctcaactctaataaaatacaaaaaattagctgggtgtggtggcagtgcctgtagtcccagctgtgccggaggctggggaacgagaatcacttgagccccaaaggcggaggttgcagtgagccgagatcatgccattgcactccagcttgggctacagagtgagactccatctcaaaaaagaaatatgcatatatactttgacataggtgctctgattagcaagtgacaagaaaggggttttcaaccaacattgcacacatatccagaacactgttcaggggtagacgcattgggaggctgcccagtgttctgctgtggcactgctaaaagcgtgatggatgcgcttcttcaggaagtgttgccaggggcagttcaggaactacatgggggaaacagtcccattactttccagctttactcctcctgttagtcaccagacagggttttgaatcacttcgggatcattttctttatttgaaagaatgtgccttggggccggacatctaaagctccccaaatggaatttcaagcataatttcaaaactttaagaggaatgtaaattgactggacccggtagtcacaattagggaaacagaagagggagatatcaggcacaatctcatcgctagagacctttgactctcctgttttacattcttttctttgtttacggacgtgggatttttgtttttcaaagtggtaaccagaggtaactaggtaaaaagttgtatattctgctcttttcgagacatattatctcataatttattttcatgctgctgtggagtcttcatgataatcacattttatgcaatgggagcctctttggaagacttaaatcatcacattaacaagactcatttctctactgcagaaacttcaaacccaaggtcattctaaagagatctgtctctcccctttataaagatctgtctctcccctttataaggatctgtctcccctttataaaggtccaaaaagataatctgtgcatcactcagtaacctttctagtgtttattcactctaagacacttatccacaccccatagccaaacttcgttttcaggcagagaaaatatgggtcatgcttcagttattcatgcctcagagttgtaagagcacagacagctctgcggtttgacacttggtggcaagtcacatcctattttctgaccccacttattctgaaactggacaatgctcatttaaagctctgccacttactggctgtgtgtccttgggccataataatagttcatatcagaattgtaaggattacatgagctaatatttgtcaagtgctaagaacaaacaatgtctggcacttagtgtcttgtatttgttaaatatatatatatatagtaaatatatatatacacacatatatacacatatatagtaacatgaccttttactatatatatagtaaaatatatatagtatatatgtatatatacatatgtattacatatatagtaaaatatgtatagtatatatgtatacagtatatatgtatgtatactatatatgtatatggtgttgcgggaagtcaggaaccccaaacggagggactgactgaagccatgacagaagaacgtggattgtgaagattttatggacatttattagttcctcaaattaatacttttgtaatttcttatgcctgtctttactgaaatctctaaacataaattgtaaagatttcatggacacttatcacttccccaatcaatacccttgtgatttcctatgcctgtctttactttaatctcttaatcctgtcagttgaggaggatgtatatcattccaggaccctgtaataattgcattaactacaaaaattgtacagcatgtctgtttgagcaatatgaaatgtgggcaccctgaaaaaagaacagaataacagcaattgttcagggaataagagagataatcttaaactctgaccgctggtgagccgggcagaacagagccatatttctcttctttcaaaagcaaatgggagaaacatcgctgaattctttttctcagcgtggaacgtccctgagaaagagaatgcgcacctaggggtaggtctctgaactggcccccccggggtgtacctgtctcttatggtcgagattgcagaggtgaaataaactccagtctcccatagcgctcccaggcttattaggaagaggaaattcccacctaataacttttggtcagaccggttgatctcaaaaccctgtctcctgataagatgttatcaatgacagtggtgcccaaaacttcattagcaattttaatttcacctcggtcctgtggtcctctgatctcgccctgcctccacttgccttgtgatattgcattaccctgttaagtacttgatgtctgtcactcacacctattcgtatactctctccccttttgaaactccctaataaaaacttgctggtttttgtggcttgtggggcatcacggatcctaccaaaatgtgatgtctcccccggacacccagctttaaagtttctctcttttgttctctgtccctttatttctcaagccagccgatgcttaggaaaatagaaaagaacatacgtgattatcggggcaggttccccgataatatggtacatatatattacatatatagtaaaatatatataatatattacatatatagtaaaatatatataatatattatatatatagtaaaatatatataatataatatatatagtaaaatatatataatatattatatatagtaaaatatatataatatattatatatatagtaaaatatatataacatattatatatagtaaaatatatataatatattatatatatagtaaaatatatataatatattatatatagtaaaatatatataatatattatatatagtaaaatatatataatatattatatatagtaaaatatatataatatattatatatagtaaaatatataatatattatatatagtaaaatatatataatatattatatatatattaaaatatatataatatattatatatatagtaaaatatataatatattatatatagtaaaatatataatatattatatatagtaaaatatatataatatattatatatagtaaatatataatatattatgtatagtaaaatatatataatatattatatatagtaaatatataatatattatatatagtaaaatatatataatatattatatatagtaaaatatataatataatatattatatatttatatatacagatatactagatatattttactatatatagtatatatgtatatatacaaatatgtatatatattttactatatgtattttacatatactatatatatttactatatgtataccatatgtatatatagcaaaaggtcatgttacattggtactttctaaattctaaactttaagtttagaaaaaagaccaacatatttgttatggcaaatggttagttctctgctcagtcaccaaacaatacacatgaaataacattattcagtagtaagttccattaatagcatgaaataaaataaaagcacctggaaggaagaaacagagcaccttctcattgagcacttacctctgtgaagggagtcaggctattgttgaactgacagaaggcatatctgtcaggactgtgtatagcaacaagacccctactgagaaccccacagcccatgcaatacagaatggggtcttagagaagcatccttaaaaaaaaaagccttcaaattgatttagacagatttctcatggtgatggacaacagattttgtgtaacaaactccagagctttatttcacattatcatttaacaataacattatgaacaaatttttttttcattatttcaacttttcctttagattcaggtggtatattgtgtgatgtgccagtttgttatgtgggtatactgtgtgatgctgaggtttggggtatgatcgatcctgtcacccaggactgagtgtagcacccaacagtttttcagcccttgtctccctcccgctctgcctgctctagtagtccccagtgtctattgttgccatcattatgtcaatgagtacccgatgtttaactcccatttgtcagtgagaaaatatggcatttggttttctgttcctgggttaatttgtttaggataatggcccccagctgcatccatgttactgtgaaggacatgagttcattgttttttatgggtgagtagtattccatggtgtatgtgtaccatattttctctatccagtccaccactgatgggaacctaggtcgattccatgtctttgctattgtgaattgtactgtgacaaacatgcaagtgcatgtgtctttttggtagaatgatttgttttcttttggctacagaccaagtaaagggattgctgggtcaaatgatagttctactttaagttcctgagaaatctccacactgctttccatagtagctgaactaatttacattcccatcaacagcatataagcattctctcctctcaacagccttgtcagcatctgttgttttttaactatttttttctttattctgaaagtatggggcttcagttactgagctttttaataatagccattttgactggtgtaagatggtatctcattgtggttttgattttgcatttctttgatgaataatgatgtggagcattttttcacatgtgtgtttggctgcttgtatgtcttgttttgagaagtgattgttcaagtcctttgcccactttttaatgggattatttgtttttgcttgttcaattgtttaagttccttatagattctggatgttaggcctttgttggatgcacagtttgtgaatattttctctcattctgtaggttgtctatttactgtgttcatagtttcatttactgtgcagaagctctttagtttaattaggtcccacttgccaatttttgtgtttgttgcaattgcttttgaggacttagtcataaattctttcccaaggttgatgttaagaattatgttttctagattttctcctagggtttttaaagtttgaggtcttacatttaaatctttaatccatcttgagttaatttttctatatggtgaaagtcagggtctagtttcaatcatctgcataaagctagccagctatcccagcaccacttattgaatagggagtcctatcctcattgcttatttttgttaatgatatcaaagattagattgttgtatgagcatggctttatttctgggttctctattctgttccttttgtctatgccactttatattttacaactttctgtttttgtaccagtaccatgctgttttgtttactgtagtcttatagcatagtttgaagtcaggtaatgtgatgccttcagttttctttttatttacgattgctttggctatttgggctctttttggttccttatgaatttcagaatagtttttttctagttctgtgaaaaatgacattggtagcttgatagaaatagcattgaatctgtagattgctttgggcagtgtggtcattttaatgatactgattcttccaatccattggcatgggatgtttttccattcgtttgtgtcacctatcatttctttaagtcgtgttctgtagttttctctgtagagatttttcacttccttggctagatgtattcctaggaagtgtgtatatgtgtgtgtgtggctattgaaatgtaaaataaagttgtagaatgtacaaccattttgtgattaacatgtctctcaccatactaagaagtgtttgacctgaggtctaaatgcaggaaacttgtattctccagggtcttttctgaacttttgggattataattacattagtaagtaacttatttactcttacattattcatgtttctttaacttcaaaaacagaggtaattggccagaggttgcctaaggcttcttccacctctaacaccctgggcgttctatgatgttccaacaggtgtcggatcagtaaacacaccattaggctgggaatgtaagtttcaacccaggtgcggcctcctagcgtgtttcttgttgcagaacatttctcaggtgttcaatgcatgcctggaattttgggcacaagtgactctgtacacatgataaagtcatagttgtatccatcttcctgactcagctgtgctccataaatgccatttacaatgattataagaaaactactcagacttaagttatgagaactgtataagaggattattctgcatcttgctttgagtatctctagaaaaaaagagacaatctcccagaagaaaatatcacaaagaccatgatttctatggtaggagtattgagtttattagaaagcagacaacatgatataggagttagactggagtcctaggaaaagtatttctcatctgtggttggtctgaaaaggtgtcttcaatgcatagtgtgagctagtatgaagagatgagaaatgggcttctcaaggaaacgtgtattgctctgcggtgaagccctgaggggcagcgggatggacctggccatcttctgaggggcccttcgtgataacgggctgctcagcaggaggaggtcctgcaggtggtgctgcaaggggtcggctggccgcagggggactgcacagacacaggctggcagcaggtggtggctcagcaggaggaggtcctgcaggtggtgctgcaaggggtcggctggccgcagggggactgcacagacacaggctggcagcaggtggtggcccagcagcagggcctgcacaccacagccgtgcacgacgaggggcagcaggtgatggggcggcagcagccttcctgcagggagcaggggtcgcagcacaccgggcggcggcagggctcgcagatggggcgcgtgcagcggggcacgcaggtcacggggcggcacacggtggtctggcaggtcacggggcggcagcagcaggggtcgcggcagcagcagggctggcagcagcctcccccgtagctcagggaggagaaggtggagccgcagcaggagccggtcatggtggtgtctgaggctggtgtgggttgggctgtggagaggagctggatgttctcaggtgtgaatgtcctcctccccctctgggccctttatatacgctggctgggagctgatgacccccaggacacaaggtcatttccttgttttcacttattcttcctgaaataacaccagcagattagtaagttttgtagacattgtttagatgctcaggtacacataaaagtctattttccttatttagtgtagacccattatattttgctatttatggttcaaatatgaatttaatgaccctaacttcaaagtctccaattatcgttataattcaatgacgcttttgctagttgctgttttgatagctcaaagcagctgttgtgctctgcatgctctgagggttattacttgctagcagttgaagtaaagcgagcatctcaagttgttagtattctttgccactgctaagcttcctgggcaaaacaagttgaggataatactacagggatagtttaaaagtcaggatttctcagtaaaagaagaattttcctgtcccctttttggaggtacaagaatgcattttagtaggtttccatcatccagtggtttttgtcttagagatatgttcattgatttctatggttgtatctttccagaccaaggtaaatttcactgtaatcttcatgatagccagtatcattaagttgtaactatgttccaagcatcatattaaaaaatacatgcattaatctaatcttcataacattcttaggatgtggatattgtttatttctcatttcacacataaggaaccagataagtgacttacccaaggtcatgtacctagtaagtgttggagccaatactcattccagaaatatctgtgggaacattatttatcagcccaaaaagctgaagaactcactgtagctaaagaatggattgtaggtaccacattcccaggtattaaggaatgtctattttatttaggagcttttacagtgtatttactttgaaaacagttgttatttatgatatgtctaatttttagagtcggttgaaaggactctatgtcttaccaacagcctcaggagtgggaagaattaccttctattcagccttctgaaaatgtcgaaacataccctaaggagatagtgtcatagttgggcataactgaatgattatggggtattgtgaacaaagccaccaatatggtgaggaagtcaaacaagtctatgtagaggaaggttgcagtcttgcggtataacaaaacccttcagtagtgatcccacttgaacgtgttctcgggcctcatctggcccatacctcagtgtcttcaacatctccctgtgtgctatgctggggctcatttctgcttatggaaccaattgtcatttttaattgtttcaaactgtcatgacttgtaggcaaattatgtcactcaatcacttttgagtctttgcctcttaatttacttggttctgaccttttcctttacaactaagactgttctattaggttggtgcaaaaagtaattgtggtttttggcactttcaatggcagaagctacaattatttttgcaccagcctaatagatctgaagttgaaggttcaagtgtaagcattcttattgatcacaccacttgcatggtttcttataggcttacccagatctgcaccagccacttcagccaaccagagaatggggtgactgtgggaataaatgagatccaataataatgataggtttgaggggaaacaaggcattgtccatttgagaaaacacttttaaataaggaggtctctagaaggctaacaagaaaaactctgagaggagaaaaacagatgtacttaacgaattttgaaaacagtgatcaagaatatatagaaagaaattagacttgtgagcctatccattggttaattaccaaaccgttaaaaaagataaaactccattgtgcacgtactgcaaatgtaaagtttttgaatataacagtcttcttgttgagaaacttttaccatatttccagaaaaaagatctttcttcatgattggtttattgttttattttaagaatatgcatatccagcatgagttgagagttgggatggaatgataatgtctttctctgttttaaccaatccccttagaacttactcatttatcattcaacacatcatttctgattatactcaatgtgccaaatatcgtgcagatcagtgggaatctagtagtgaacaaagttagtcgagatcctggccctcaatgtaaattagctcagccattgtggaaagcagtttggcaatttctgaaagtatttaaaacagaattaccattcaacccagcaatcccattagtgggtatggacccagagggattgaaatcattctaccataaagacatatacatgcatatgtttattgcagcactgttcaaagtagcaaagatatggaatcaacctaaatacccatcaagggtggactggataaagaaaatgtggtacacatacaccatggaatactatacagccataaaaaaggaaattatgtcctttgtagcaatgtggatgaagctggaggccattatcctaagcaaactaacacagatacagaaaaccaaatacggcatgttctcacttataagtggtagctaaacattgagtacatatggacacaaataagggaacaacagatactgaagcttacttgagggcagatggtgggaagagggtgaggataaaaaaaccatctatctgttactatgcttttgtttaattaaattaattaattaattaagttttgagacagagtctcactctgtcacccaggcaggagtgcagtggcgcaaccttgtctcaccaaagcctctgcctcccaggttcaagcgattctcctgattcagcctcctgagtagcttggattacaggcgcatgccaccatgcccagctactttttgtatttttagtagagacagggtttcaccatgttggccaggatggtcttgaattcctggcctcaagtgacctacccatctcagcctcccaaagtgctgggatttcaggcttgagccactgcacctggccatctgttactatgcttattacctgggtgatgaaataatctgtataccaaaaccctgtgacacacaatttacctatataacaaacgtgcacatgtacccctgaacttgaaataaatttaaattaaaaagactaaagacccctgccctcacaaagcttcccttgcctcacttctctcaatgggcaggtagatatgcccaggaatacatgctgaacaatcaaagaaatctcttttctatcacatgctaggaactaaaaagatatttatcaggaaaatgatagtggttagccttccttaccaacatacaagtatttaacaaaatcaaaaatatatgcagtatggattaatgttatcagcatttcaaccgcattgcagttgtttaaatggttaagatgtatgcggagctcaaaactaggatgattacaaccaaggcttcatttctccctgtcttctcagcagcagccactccactggaagtagaactggccatggtggtgctgacgggaaccatggagaagatgggatagtggttcctccagcataggatgttcagtggctagggattcccaggtcttgtttgacatcaattaccgtacagtttcctacattggtgaacaaatagggctataacttagcttagacttcctcccccttatcatgtgtgtgaattattcataagtcaagtttatgtttacagagacctactgtagtctcaccatttcgtcagcatcaccataaaacctgcgactcgaaatatgaaggtgaatcatgagatgatcagatttatttgaaatgctattaaaattatagaccttccacctgagttgttcctattctaaagctcaaaaatggcccttagaaaatctctcctttcgttcttctggttctgcatgctgtaatgtaagctaaatatgagcttttgaagagcaataaacaataaataaaaagaaatgtttgcttccccagaaatataattttatttttttttacagtgcaaaaatacagcatacaaatagtattatcctggaagaaaaaaatctcatctgagaaccttgaaacagtagaaaaaagggtgatgagtcagtgggacagagttctattcaagaggagctttgatttttatttactcgttttttttttcaagccaggaattcgaatgatgaaagctggaatttttctcaagattgtcagagagggccaggattagctgcataattatgtggggaaatagataggatgttattgttgaattcgtgcttgaggatcagctaggctgcaaaggtggagtctctcatctgatccagaaggggtagaagagtctgcacaagcttctgtgcacctgggaatgtttcgtgcgttgagaggagaggtggggtctcagcaggaggaggtcctgcaggtggtgctgcaaggggtcggctggccgcagggaggccggcagcagggggactgcacagacacaggctggcagcaggtggtggcccagcagcagggcctgcacaccacagccgtgcacgacgaggggcagcaggtgatggggcggcagcagccttcctgcagggagcaggggtcgcagcacaccgggcggcggcagggctcgcagatggggcgcgtgcagcggggcacgcaggtcacggggcggcacacggtggtctggcaggtcacggggcggcagcagcaggggtcgcggcagcagcagggctggcagcagcctcccccgtagctcagggaggacaaggtggagccgcagcaggagccggtcatggtggtgtctgaggctggtgtgggttgggctgttgagaggagctggatgttctcaggtgtgaatgtcctcgttccactctgggccctttatatatcctagctggatgctgatgacccccaggacatgaggtcatttcctggagttgtagctgcccgttgaaatgagaactctggatttaactgctgaggcagcgatccctaaatcactaaagaatgctttgttttctacctgtctactttttccctagaacggaatacctggtcatgtatatcatcagaacaattgctcatctatcagctagtccttccaggccatgccatgtgagaaggtgcaagtttgaagaatccagccaccatcacactttcctcttgttcgctgccatccgtgacttaagcatgggactggaatgttcatgagtcacaggctgggtttctgattggcattgagatcaagcaagaatttcttaaaaaccaaaatggctcataagagcagatgtgtattgattctgctatggaaagaatggcccagtgtttaatgacacagtgcctaaccttgtttataagaaaatcatcaccaaagctgctagactgattttattttagtaatctgagttggtttataactcattaacacttatgagacacttattatgtagatggtactgtactatttgggggtggagggggaaaggaaagaaaaatagctttcaaatagtttcctatcacatagtaatcataacttttagtaaggcaagacaaagataaatcaagcaattaaagggaaagaacttttctgggaacaataaggtcaaactaaatggggatttcattcattctgtgcctttctgaatgcccttccctgattattgacctagaaataaaattgaaattgggctatttcttgctttcttgctttgacatatgcactttgtattacatacttaaaaatctatggacaatatctacaaaggaatcaattatctttctgtcacagcttctttagtttgttggctgagggttttgtttgtttatgaggtgggaaggtggcattatgaaaaagacaaggggaattagtttagctggtgaccaataaaatagctttgtcttttccagccatagcaaagatgaataggaatacagaaaataaatttagagttggaaggtagattaaagataacattgtccaaggaatgctgatggtcttcagtgcaaatttacctctgaggtgtgttttgttttgttttctctttttaaaaatacaccctttggtctatcatatccctgatctttgaagtcctttgagtctatgatccatcatagtccatcacagtttttggaagaccagatttacaaaatgaattcctccaaagtcgtacggatcaaagagtggcaaatatttagcaataccacaggtcttctgtggagtagaaacactggtgatgtctcccagtctttttccaactcggagtcactcaaaatagataacatgtagcagtagttattaaaaagttttattccctttagtgaaataaaataagtactcacttgatacatggtttagcattctgttctttgttttggaatgtatacagagatgccaaactaaaaagagaaatatgtctgtaaatccactgcttttgttaacaaaagaacacagtactaagaaatactgttttctaaaattataggctgttagaaaccttgctcttccaagccacatcagtaagaaggaaacatttcactcttgcctagacaggatctaagtcatctggacagagaagcaacctcagtacccaacccaggtacagaatttcagacaagtgacttgcagacacaacattccccatttgtctcaactatacagtttccagtgaaagaggaccataagtctgtttcacagctcaggtctggtgttaattattttttatacacagccctgtttttcttgagcctatgaaaacactatgtcacgtaattttaccccaccattcctcaacattttataataacatttctcctcctttgtttgggaggatgccccatggtcctcagccatgtggtctcccttgctgtagcacattaatagtcctaagctattggacaagagatgtatccctggtctttaccacatggacttttttagtcatgttattcaagttccacacattcttcaagtgcataatcaccaggatggaaacaagtaaatctgaagcacagtgaaaataacttgtgagatttttgtagttggatagataaagaatgtagtgttggtgacctcttgtgatggtgggccatgccctcttcttaatagttttatgaattatattttgttaggaactagtctggaagccactagatgttaggaaaattattaaaattctaaaattagaaaatacattccttaaggacttcgttctcagaaataatcttaaaaatatcctccaatcataagagtcagggatgggatggggaatattgacgggcacagggcaggaggaaaatggagaagataaagaaggattccagtcctttctccacctctttgcagttgtctaacttagagtaaatgacttacccttagccaggtttcctcatctgtaaaatgggcagagtcttcggtgcctggtgttcttcagaggctggcttatcataaaatccatacaaacatggaagacagagaaagggatataattaattagatataattagaaaagaaaagagtttagttgtgagagacagaaaaactaaatgatcaggggactggtggaatttgttgctagaatttttttaaaaatttcatctgagttttttagatattcatttgcctaaagtcagggaaggcaaagtaatcttttgaggtctattacagctttgagttgtttaattcccttggaaggttcaatgtgaaagaaagagtcgaaccatcagatacttacatgttgctcaatccttcttttacctgatgctgcactcctattcataaatcctataatctaggactcattcctgtggacttgtagaatgaatttttaaagattattttcattctgagacagccttaatctgatgccaagttgttgtgggtttttttttttgccttcttcattatatttattagaaaatctattcctactggtagatgtagactatcctgaaaaaaaattacaatttaagtttggttagtaaagccctcccctgaatttgttcccattcccagtgagttgatatgtagtagatagcacatcttttgagcctgttcgatacagtgatgtccaaatgctccacaaggaatataaatgaatgttactgggcatttaactatgtgccaggcatcttgcatacataaaaagttataattgttatttaacttccctagcaatctacattggtaaatgttgcttttcccattttgcggatgagaaaactcgagagtcagagaggttaagttacactaatgccaaaattttttctttaaataattatctaccttttaaaattcttgtggtaaagacaatttccttttattttgacaactaaacaaacagaaattaagtaccggctacgtattaaactttgagctcagtattggaagccaaaaacaaactgtggtcccctccttggaggcaaaaaaacatataatctcaatacaatgccttatggggagggaggtaagctattggaacttgctgagagctcctaacctgtatgtgtgtgtgtgtgtgtgtgtgtgtgtgtatgcatttgcacatgtgtttgtgtgatacaggggttgggacaggactactggagaagactgaattgaatcttggaaatgaatcagagttaagtaggtgatgaaggtgaagagaaagagtgtgtaaaagaacagataagtgaaagaacatgaggaaaagcgaaacatttggaactgcaaatgtttaataactataaggtcagtgttgcttgaagtgaatcttagtggggagcagtgagacatggatctatagagatgggcaaaggacaggcagcagaccacctgatgtgcacacacttcctagccacatgggtaatctgaggactggcctagctctcctgtaacatcttcaaataccaaatacttgtaccaggaatcctagtgcctgtctctgttcctcttctgtctttctcatcatctccatcatcttcctcttcactcttcctcctattcattgccttgcctcccctcttcactttttattcatcccttatctcttactttttgtctctctttttttgttgtcattttattccacctatgacaaactcaagatactgtttttttgcacattcatttacattcacttctctgccaaaccgattcttctgattacagtttagcaggtgctgtttcatacttattattatattacatttttttcttcactttgggtgtcttcattgtggcttgtccttgtgactattcttggaaggcttccaggccatgcttgttaagccctcaaggagctcaaatcctggtcttcctctgaaataatggtcctgaaattctaatgaattacatggaagtgatagaaaataaacagccttgggccccactcccagagattttgattcattaggtttggtttggggcctaagaatgtgcattttaataggcaattgcaagagattctattgtgtatgacgcatgggccacactttgaaaaatgctactctaggaactgtggtaagaagatgagatgcgctgtgctggtcagtttactaccagtggtcattctgggcttggcatatgctattcccacttctacccctcttcatgaacattgtctttccttttgtctattccattagaccataagcttcttggatacaaggcatgtagcttgttcatcactaatcaggcagcacctgtcaactggaggtcccttgataaacaattcctgaatgactgaatagatgagatttctatggataaggttttgcttaggttgagctttgtttcccttgtgcaggttccaaaatcttgcttatctgtgtacgctaataaacatgcactaacgaacaaatcagggagcagggcagtctgctatgccaggaaaaattagtttattgacaacagtgagcaacacattgcaaaagatgatggtgacagtttgagcagtaaaaaccatcaggttgtagaatgtgtttgcaaagtccaccccaggaattcttaaaggtcgatttactatccataatgactaaggctgatgtagacacctgaaaatgtgggtgagggtggtaatggacgtctgcttacaccaggctgtatccagatggtaaaaatcactattgtcaccttgtgaaaaaaaatctatttttcttttaactttttaaaaacaccagatagatgtttaggcttcagtgtattgctctgtgggggcattggggtctcagcaggaggaggtcctgcaggtggtgctgcaaggggtcggctggccgcaggggggccggcagcagggggactgcacagacacaggctggcagcaggtggtggcccagcagcagggcctgcacaccacagccgtgcacgacgaggggcagcaggtgatggggcggcagcagccttcctgcagggagcaggggtcgcagcacaccgggcggcggcagggctcgcagatggggcgcgtgcagcggggcacgcaggtcacggggcggcacacggtggtctggcaggtcacggggcggcagcagcaggggtcgcggcagcagcagggctggcagcagcctcccccgtagctcagggaggacaaggtggagccgcagcaggagccggtcatggtggtgtctgaggctggtgtgggttgggctattgagaggagctggatgttctcaggtgtgaatgtcctcctccccctctgggccctttatataccctggctgggagctgatgacccttcaacatatgatcattttcttgtgcatcttctggccaattaagtgaagatttagcattgactaatggtattttggtcactcttcacctcatacatattcatgtacatacaccacaaatattcgctcattttcttgtattgtttatcctcactaaatttagacattggattcacttctgattaattttcctttgaaatattcctaacccataagagagaaaagaatgtgttttctaaattagtgtctaatcgctctgccctttggcgctaaaattagcatgttcttccttgtcttcaaaggctcccatcaccggcacccaagcagtgacttgccttattaatgcacatgggcatgatggtagcaggttaattgcatcatcctagtgcagaccagtagtcatctgcttcacagatagctccttccatgactcacttaaagataggcttgtggtttttcatatgagcagggaccacacgaaatgcagatccctggccactggtgtggtcactctcccctgactaggacctgggctttcctgccttggttttgatgtgtcatcattcacctggaatgccctcctcatccttccaatccaaactcaacttctaccttgattgtaaaaccctcttcaaggatccattgcaattattatatttgtaatttgtttggaattagtcgttgcatctgtagagtccgggaagggattgcggagaatatgtaggcctatgccctcactctacagctgaggtcctgagagtgtaccaaggtcacacaatgaggtcaccatatgaggtctgagatccaggtctcctcagtctgcagtaagtagcctctactatgagttttatgctcattggattcagtaaaccatggtctttagacaggaaagaaaacatatattaaagtagaagcccagacttcatgccactatgcaatatatccatgtaacaatgctgcatttgaacctcttacatttatacatattaaacacagatttaaaaaaataagtaatgaactttcctttcagcagcaaggttagaagtggtactggaagagaattagggaaatgttttgcccagatgacacattgtcatcctggacccccattgactccactaagtatgacaatgtgtctgagagctagagaagggacctggagaaagctaacatgatgcagggtttattagtggaacttacatacaagggtggtccagtggtggtatctggacaggagaactgctattatttgtaaaaagcatgcagttcacacagtattttcattagaaccctccacctaacaacctccatttaatccaaaacaaagggcctcaatccccagtatgacctgtgttctaatggatgaggtggggattcaaatgtccttcatagataaggagtggatctccaagttggccactcccagatccttagctcagaactccaagcatacattcttctttgattgtaggatcattctcagggtatgcttaagttaagttattgctgccagatgtgtctgccataccctccacctcagcatacccttgaatagcccttacattctaatcacaccattcttctgagatttccctggggctaggatatgcagaggagcattgcaaccagatgtttcagcagcaacataaactactacaacaaaaaagaataatgaatgtaacaacaattgtactgtatagaaagtttttccaagcactcaggagttgattaaaccatgtggttacagggtcataagatagagattctatagcagaaatctgggtatctagggcccacatggcctgtgttacattgtgagagtaatcagggatatatacacaaaattcagttttaattaatgcacaggttctgccctgataagcggttaagatgtcctgggccatgcaattttgcaaagtaacacacctaatttgggcagtttcttcagtgagaagagtaatatcatggcagatatcattaaagactgcagccctatgttaagccagggcctcaacttgcagctgtatgtctattgtcaccacttgggtggtgagtggtggggggagtggcgggggggacatggcaaaagtggccaacgggtaaaaccactgggatgcatgcttccagcagtgcctggcttttacaatttcccagttagtaagaatggtgtctaaactgggcacgatgtatcccagcaaatgaggatgtccccaggtgcatctaccagtccagttatagggtaagtaaggccaactgtggatgccgcatgcccacagccatcctaaggggtgtggtaggcccccaggtggagagtcactctgtcgtcgcagtcaagtatcactggttacctgaagagattggtttcattgctgtcatattccatgtctattacctgaagaaatagattacattacactgtgggggtagccatcccatactactggttttagcttgtggcatgctattatcatgccttttaatacatgtgggtgcacagcccacaagctgtatctatactgctgttgtccaccctggcccatcatctacagaataccccacagtgggggtgacattaacctgctcctatactaggtggaaaatatgttgtctcatctctgatggtgggaaacttatcacatgaagtgtggttattgctaaagggaaatgggtgagggtcattataccaagtatagaaatggctccagatactgaggttagctgcttggatgcaccatggcaggctgatgctggaggagaagggcagctccctgcagatgcaacagtctgttttgttttggggaaaggtcgccatttgcacccagttggtgaagaggtacaccacctatgggtgacaggtgagatacctagtgggtagaagaatgggcaagttggccgggcacagtggctcacgtctgtaatcccaacacttttggaggccaaggcgtgtggaacacctgaggtctggagttagagaccagctgaccaacatggtgaaaccctgtctctactaaaaatacaaaaaaatcaggcaggcgtggtggtgcatgcctgtaatcccagctacttgggaggctgaggcaggagaatctcttgaacccaggaggcagagattgcagtgagctgagatcatgccactgcactctagcctgggcaacaagagcaaaactccatctccaaaaaaaaaaaaaaaaagaagaaagggcaagtcaggccatctaacaagacaggaagttgtgtcgttctgagagatcaccacccccagcagcaacctgtgcctggtttgcaataccacatggattgcccacttctgcaacacgttgcagccacagtaagacagtgtggatattgtaatgtcccataatgacaggatgatcactcccttgcacaagtggggactaggattgattattttagaagtacaaggaggaataggatgtaaaataggtgtgatctgtatatcattttctacgcccttgccccatggagtgaaaaaactgtaccaactggggctggtttgtgatttccgggcacatgtaatgatgtgctctccagtgggtaggtcctatggcaagggcatagccccaggttgagtcccaggttgaggcaaaggaggggggtaccatcccttacactgtcaacctggatcgtgatggtggtatcaggtccttgagccagaagagtgtgtgcactggggagatgagagcacacctgttaattcagggatatcttgggcctgcacggcctgagttacattgtgagagtaatcagggatatatatacacaacattcagttttaattaatgcagaagatccacactaagcgtccagggcatgtgattttgcaaagtgatacatctaatttggatagtttcattcagggcgcagatgggtgctggtaagcagtgtgtccacagagccagagagggcgtctcctgccagagttgtttcttcaatggttgtttcatccattcaatcagccccgctgctatagggttgtatggcaggtagaaatgccaatggatatccagggcctccaccgattcctgcactttgtatatggtaaagtgagagccctgggcactgttgatatcagtggggacgccacaggccacatataactccagtctttttatggtggttttctgggtaacatacttgctgggatacacctacagtagccccatgcaggtgtctgcacaagtcaaggcgtagcggaagccatcagataggggcaaaggcccttgggattctgggaccttggccttcatcctagtataaaggggctggcacctgccattcctctgtgggagggcagcgggctgagcctgaggctcctttgtgaagcactcttccagcttgagcttctgccatagcctgaccagaacagcattgaactgtaggctcttagataacagtctagattcaaatccaagcatgtctaaatcgaaagctgtgttttcacaaataggcttatgaaaatgagattctcctttgaattaatttgaataggctcactttgcactatccattaatcctcattatattgataaagctaaaaatttaactaactatcccctccagaaaatttatcaaaatttaccataaaaccaaccctgtcacaaatacttggccactgttctatttttattttctttgtagaaagccatctgttcatccttgtgtattgattggtgtattaagctggcttcacattgctaccatggttgaattagacagctattgctgcatagcaagcaaccacaaactctcatagcttattgtaacaagtatttatttattggtcatatatttgtaggttagttggggtttggttgattaaggttggccttagcttctgcccacaggttggtttgggactttcttttgaatgagagttgtcatatttagcaaataaaaatacaggttccccagttacatgtcaatttcagaaaaacaacaaataattttattacaattatatctgattatgcatgggtatacttacatttaaaaattatttgttgtttgtctggaattccattttaatggagtgtccggtattttaggggccatcctcctctgagaacaaaggcccaagggaacaatctcacattttgagtcttcgggtcatgccttctcattggtcaaagcaactcacatggcaaagtccaagtcagagggtgggagaggatacttctggagttgggtgggaggaggggggagagtaaacattaataaggaataatctaatctaccaaagtagagaatcaattattttaataatctttgtgtgaggcttggaaaagacttctagaagatcaaattagattatgtctatttcattagaaattctattttgggatgggagtggtggctcatgcctgtaatcccagcactttgggaggccgaggtgggctgatcatttgaggtcaggagttcaacaccagcctggccaacatggttaaatcctgtctctactaaagatacaaaaattagctggccatggtggcaggtgcctgtaatcccagctactcaggataataatcaagtgacacagcatatccaagagcattgcctagaaatctatatttattaaaaacaaaactgcctgagatgttctaggaagatgccaagaagagtccaaggccatgaccttctcatcaactccttgctgggtgcaattccatccataagactgtggcctaaattcaaatataactgcgactttgtattctcaagaagatgaatcaggagtagggctctgtgaagtatggcataaagagccaagcttttttacaaggcgggaaagaccaaagacttagtgacttgaaaggatatcagtatttccggtgaatcttgtgtgggtcaaagaccatttatcttgttgcttggtgagtgtggctacttccttgaaccacatggagacacactgtacaggaagaagtgcctccttctgctcgtcatctgcgattctcatctgacaccatggtcagcttctgttgtagctctgtctgctctgaatagagctgtggccaaggcctctgccagacctgctgctgctgcagttgctgccagaccacctactgcagaaccatctgctaccatcccagctgctctgtgtccagctgttgcaggccccagtgctgccagtccctgtgctgccccagctgctgcatttctagctgctgccactcaagctgcagtgtgtccacctgctccaggcccagctgttataatccccagtactaccagccctcctgctgccacccttctgctgcacttctagctgctgccaccctggctgctgtgtgtccagctgctgctgtccagtctgctaccagaccacctgctgtggtccagtctcctatgaatcctcttgctgttgaacttcattcctgaccaccagccctggttcaaccaccttgttgtcagtgtaccagtcattctcattccccttctccactggacctggccttgccctgatccaccactacatttatatagctcattgttcattccaccaagcaactattttaaaagcaaaaatttaaatgcatatcgtacaaaacctccaacttctatgcttggtgtgcagtcagatgaccagatatctcacactatttcattggaacaggcttctaagcttacaattgccgagtgtggtctggactttgcaatgaattacgtctggtagagtaactatatctcaataaacactctcttggtatcaaaaacatttgtgacctttcagtatttcttactgttgattatttatttgtaaaatggtttgagttcctattgtatgggcaataacaaaaaaattgatattatatgtatcagccaaagcctgtattagagaaaatgccaaataattcattttttaatccaaaacagattgctcactttacctgccatcaagtttattgagacaaaacaagaactcaatttttactgtaattaaattaagaacaaattagcaagctattgggctctgggaattgcataaaatgaatgagacccacttcttttcccttaggtaactcacaacataatcatggatttttttttttttttttttttgagatggggtttcgctcttgtttcccaggctggagtgcagtggcatgatctcagctcatggcaacctctgcctctcgggttcaagtgattctcttgcctcagcctcccaagtagctgggattacaggcatgaaccaccatgcccggctaattttgtatttttagtagagacggggtttcttcatgttcatcaggctggtcttgaactcctgaactgaggtgatccacctgcctcggcctcctaaagtgctggtattacaggcgtgagccaccacacgtggtctgaaagttatttttctttcctttccctctccactcaattaattcaattaatcatgaatttaatttaaatgcatatgtcagggagagtatgttggtaatattagtgagaaaaaggactctattctattggagaaaagtaatacatacgtaaggattgattcatagaaataaaatgtgtcaattctgaaaattcaggttaacatgcacaggtctcaaacacgtaagattatgtgaaggagaatcagatcacagccgaatatttatatctttatgaagggtagtcttattaaaaagacatttaaaaaattatagtccttttaaggaggagggatatgtcaagattaattcatggtgagttctatggaaaaataagaggcataattttaggctgaagccatagagtcagtgggaaaatcagcgagcatgagtgatgaaacacgtcattatgggaaagaaagtgatggaaaccaaattggaattgcagttgagttctatttttgagatgcttcactgacccattaatgatattcatccactcatgctccattaaagctccaattgcagagtttgcatgcaggtctacctatgagacatgcaaaggttagggctcactccacatgacctggatcaagtcacccagctacctgtgtttcctttataactttgagattcccttttgcattgggagttcagttcatattgtatttcctgtgtcttttcaagccatttccttccatttcaaaatgatatcaatcaaaatgatatcagtaggctcaagagctctaggcaaaacttttagctgaagaggaaaataaaaaagtaaagtaagcacaaaactcaaaacaacatattcagaaattgatatggtaatgcgacgtgagaatcgtatctttgggctcaggcatccctcttcaatttattccaggaccataaatggtctatacaagctgtttctcgtttcagtattgcttaagtacctaggcctgagaaatctatcagagcctcaaactagtaatgatgcctattctgtcatatctgcatattgcaaaactgtatttgttttattcatttctatgatctcttctatggcacataaacatttataaatatgttatcttcatttttgaattttttcctttttttaaaagacaggatctggctctgtcacctaagttggtgtgcagtggcaccatgtcagctcactgcaaaattcaactccacggctcaagccaacctcccctagctacttcagcctcccaagtagctaggaccgcaggcatgcaccaccatgtctagctaatttttgtattttttgtggagacagggtctcactatgttgcccaggttggtcttgaactcctgagctcaagcaatccacccacctcggtctcccaaagtgctgggattacaggtgcaagccaccacacccactttattaccagaaaatataggtattgttaccccattttttaatttgcctaccacttgtgtattctttgctatttttatcccctaccacttttagaatatatttgaatctttttaaattttatcagcttcatctctcagaaccattattttatgcatgacatctatactgtaatggaattctttattttgacttgtatttcagtcaatgggaatatttcttaaaggaattttaaagggaagttatatatcccgagtccttgaatctatgaggaaatctttccattgccttcacacatgaccaatagcttgtgtggatcaaaataacagggtctgattctgtcacctaagctggagtgtggtggcaccatttcagctcactgcaagctccaactcctggactcaagccatcctgccacctcagcctcccaagtagctgggaccacaggcatgccacaattttttttgcccttcaatgcagtttaggcgtgaataaaatattggaaaataaaattaaccttcaggattatttaacatgctttggaaacacagagaaagaatctcaccaacatctggagcatgggcactagtttacttcaggaacacttaagggggagtgtatatatgagatactaagtctaattttaacagtttagtaatagcaggtccttaaaatgtcagaaaattaacttttatgtcctcttatcctctttgaatccattatgatacaccaacttttaaaaggtgttaaaaaacagaaaccctcatcttactttctcaggacaggagacaatagcagataagaaagtgtagcaaatttggggcaagagcaatggtggtcaactaaagataacaaaaggagctacaatgtgaatgcatacagagagagtaccacagagtgtaaagttggttttccttgaatcctcagaaaggctcagaacccggagtcaccaggtaatacccctgaaggcagggtaggcagcaggatgcttcgacccctggatccctaccccaccctacaaagttggtcattaggcctcccccacttccaaccaggagaaacaagggttatcttccagaaaatttagtgacagagactccagatttgggaatactaaagtgaacaaaagtcaagaatagaacagaaaacagactcatgcagtgaaaatctgagtactgtgctcagcatccaggactgatggccataagctttccaagcaggatattggaagattctcctctaaagaaactaaacatataaatcttgacttcttttttgtggatgaaggggaggagaggtgaagagatcaattaacaagccctgctgtccacacagaactttcaattggctttttagtgccatgttaaccaatatgcttcagacacttgggaaatgtctccagcctgacaattcacactaatttaaaaagaaaaaaagaaaaagggggaaaaacaaatttgacaggaatagaaactacagggagcagaatagaactaaaaaattgtaaaacaagaactattgtaaataaaatactcaagagagctaagagaagaaattctgtttgaaataaaaacaagattctaagaaacaggagcagtcagagaagttgagtgaaagcttgagaattaaaatgtgatagaaaaaattagaaaaacgttcagtaaaatgtttggaaggtaaagtagaacaaggagtcaaataatttgttctcctgtcttgaagatatgtaaaaaaatttataaaaagaagtgaaagaaatggacattaaagaaactataataacacagaggatcaattcaggagatctaccactcaatgaagaaaaattttagaaagacaaatgagaaaacataaggagtcaggtgtaatggttgcctgtgcctatagtcccagttacttgggaggctgaggtgagagggtcccttgggcccagggatttgaagccagcctgggcaacataaagaagtcttgtctcaaaaggaaaaaagaagacaggaagggaagggagaaagaaagaaagagagagagaaagagagagagagaaagagaaagaaaagaaagaaagaaagaaaaagaaagaaagaaagaaagaaaggaagaaaggaagaagggaaggaaggaagaagggaaggaaggaagagaaggaaggaagaagggaaggaaggaagaagggaaggaaggaagaagggaaggaaggagggaggaaggaaggaaagaagagagggaggaaggaaaggagagaaagaaagagaaagaggaaggaaggaaaagaaagaaagacaaggaagaaaaagaaaggaaggaagacaggaagaaagggaaatagagaaagaggaagggagggagggaaggaaagaagaaggaaggaaggaaatacaagggagaaaactatcaaagaaatagtataagaaaatttctttcagaagggagctccagattaaaagaccaccagcgctgagaacagtgaatgtaaggcttacatcaagatacatcactgtgaaatctcagaatattagggatatgaaaatggtactgaaagcgtccaatgaggaaaataatatgtggttcccataccaaggttcaggaggcgaaatggcatcacacttttcaacatcaacaccggaagccagaagacaatgggaaatgccttaaaatttctcagtgggatgttttttagcctagaattccatgcctggccaaactaccaaacagaaacaaaggaatagtaacattttcagatatgaaaagcccaaaaaaatccttattgtccgtgaaccctttctaaagtaacgtctggaggatgtgcaccaccaacatgaagaagaagttgacaaagaggagaacacagattcagaaaacaggaatttcaagtcggaaaatcagaattgcattcaagataaatccaaaaatggcaaccgtacagcaagcctagaaagcaatcagtgcagaggagaacagtaagatgaagattttggagggagaactctaggaaaaaagatctttctaaatggtgtggttacagtactatttcttgacttttaaagtttagatattatctattggcccactgttatgtgtgatgagaatttagctcttacatccctctctatccaacagccaccattcttcctctccctttgtgttccaacttcccaattgacctgagaattctaaattactgtcaaatgtagtctttgaaaaggtgctcaacgtcactaatcatcagggaagtgataatgaaaaccacaataagatattacctcatgcctgttaggatggctgttatcaaaaagtcaaaagataagtgttggcaaggatgtggtgtaaagggaactcttatacattgttggtgggaatgtaacttgatgcagccattatggaaaacagtatggaggctcctcaaaaaattaaaaatagaactcacctgtgaaccagcaattccacttctggatacatatccaaagtaaataaaatcactatcttgaagatatctgcacttgtatgtacattgcagcattattcacagctactaagatacagaaatatctatatgcccatccacagatgagtggataaagaaaatgtatataaatgtcattattcaaaatgcaattcagcctttaaaaggaagaaaatcctgtcatttataacaacatggatgaacccagaggacattaagctaagtgaaataagctagacacacaaagaccgatactgcatgatctgacttatatggtggttgcatggggtggaatgaggaagaaacgggtagacgttggtcaaagagtataaagtttcagctatccaaaatcagtaagttctggaaattgaatgtatggcaatgtgactatagttaacaatactgtattgtacacttgaaatttgctagaacataagtattttcaccacaaaaagaataactatgtgaggtgattgatatgttaattagtttgattgtggtcatctatttcacaatgtatatgtatatcaaaacattattttgtacaccttgaatatatgcaatttttacttgtcaattatatctccaaagagctttcaaaaagctaacaataaattcaacaatatgaaacacatgagaaacatgctgccaggatcttagaagagggcaacttaagggagaggtggcttgggcagagagcatcaggaaaggtttgcttgtggaggtaatagcacctaagtcttaaagaacaagtagaatggaggttcctgcatagtctgtagaacagaatgagagagttctcaccattgttgaatagataagtgaatgatgatctatagctgtataggactcctaatttccgattatatcaaacccaacaaagaccttccaaaagaacatttctgaccaatataaagctcatctgcgcacatggacctgctattgtgatcccacctgtgagtcacacagggctcttcaaggccctaagccaatccctacatgaccctgtgaatattctgaacattgaagactgtggcattagtgattcacttttgctctattctattctattggcattatgtattcctaggagtattgtgtgttggggcaataattcattacttgactaacatattacctgaaattctgatgatcaggttacatcatagaaaagaattaggacaatgtcctgaatatctcctacgcttcctaaatttcttgctataattgatcatcatacaacaaaatcttattaatttgggacatgtgcaggctaattttccctggcctgtaccgagggaaaattggcatcttccacaaaattcatggacaaattgggaaggtaaatgtaattacagaagatatatttaacctagcgtgaatgtactttgtgctaattgcaagtgaatcatattattctgtacttgagccttgaacctcatcacttagaagcactctttagctatgatgcttaattatgtttaaatgtattgggaagaaactaaatgacattattattttatttcattttttaagttttgaggtacaagtgtgactttgttacatgcatagattgcataattagcaagtcagagcttttaggccatcatcacatgagtaacataaactgtacccattaagtaatttctcattgtcaaccccactctcactctctaagctttctgagtgtccatggtctatcattctactctctatgtccatgcgcacacattatgtagcccccatgtgtgagaatatgcgatatttgtctttctgtgtctgatttgtttcatttaagataatgatctccagttccatccatgttgctgcaaaatacatgattttattatgattttatggtggaatagcattaagtgacattattttctaaagtccaagtcaaccaaattagtgtagcctgcactttggggccatcattaagtaaaatgagggttatttgaaagcaagcactgcatatcctacagtactgcaacagtcagtctggtaactgagataattactcggggattaaagggtggtcatgtatacagtatggacacagggaggacatttgtcccaggcaagacagagcaggattggtgatatttcatcatacaactcagaatggcatgcaatttaaaacttacaaattgtttatttctgggatcttccattaatacattagaaccgtggttgaccataagtaactgaaaccgtggaaagtaaatccacagatagggaaggaatactgtaatgctatgaagagagcattaagggtgattctggtcagggctcagaagaaaataatagctgtagggaaagtatgaatcttcttataggttatttaggtggtcgtggccagaatgctgagagaaatatggacaatagaggctattctgatgagatctcagatggaaatgaggaacaagaattggaaactggagtaaaggccatccttgttacaaagtggcaaaggacttgattgaattatgttcatgtctaaaggctttatggaaggcagagttaaagaaagaagaacaagtatatcgggggaagaaatttccaagaaaaatgttgaaggagctgattggtgtctttgaactgcgtatagtaaaatgcaagaggaaagaaacgatttaaaggtggaattcgcaattaaaagggaaacacagaatatagatgtagaaaatgtgcaacctgaccaacaatgagaacacatggtcacaggaaggggaacatcacacaccagggactgttgtggggtggggggaggggggagggctagcattaggagatatacctaatgtaaatgacaagttaatgggtgcagcacaccaacatggcacatgtatacatatgtaacaaacctgcacgttgtgcacatgtaccctaaaacttaaagtataataataataaaatttaaaaaaaagaatgaaaaagcatgcaagggtgtggccaagtgatgctttgatacaaggattgataagaatagaaggaagctaggtgctgttcatcagatcaatgggagaatggctctgaaggcatttcagagattgttgaagctatccctcccatcacaggctccaaatgagagaaacttgaggtcagaaagggcttggtactctccacattctagcacagtgcccctttgctgctccagttgtggctcaagtgggcttagatgagacttgtgctgctgctgcagagggtacaaactgtgagccttggtggtgttgatgtagtactgactgtagatacacagactgcaggagttgtggggcaatggttgtccacctaggtttgaaaggatgtttctgacagcctgccttaggggtgtagccacagcagagaggtcctcctagggccatgctcaggaaaacggggggtcagagcagccactgagaccctagaactgtagaactatcagcctgcaatactagcctgagagagctgcagcagagactccaatcagatagctgctgtatgggctgagcccagcaaagccatggggcagggctatctgagggcatttggggcctaacaccaaggccccaggcagcccttccccatgtcgggcacatccaggagacagcacatggagtcgaagtttattctccagtcttaagatttaatgctgtcttccctgttggactcacctggggccagttaccctttttctttcctgttgctcccttttggaatgggcctgtctatcctatgcctctcccaccattggattttggaactagataacttctttaataggttcacatatggaggagaatttgcctcaggataagtcctgtgttgagtcttattcatatcagagtcacatgagactcttagatttacattttgacttttaagttggtgatggaacatgactttgggactattgggataaaaggaatatattttgcgtatgagaaggacatggatgtggggggccaagggtggaatgcaatggtttgaatgtgtccctcaaagttcatgtgttggaaacttgatcctcaatgcagcagtgttgggaggtggggcctaacaggagatgtttgggtcatggtgacaccaccctcatgagtggattaatgttgttatcacaagagtgggttccttataaaaggatgagtttgactccttctttctctgtctcaccctctctcccttccacaatgggataacatggtattcctggttatctataaccaagtctcattctataaacggaatcctaattccacaaggttccacatatgctatttatcaggggacatgttgcttaccacataaataattgtagttttcctgaaatgaaactctgatctccttgtttggaatgttttcctctcttttatccagaagtcaaacgatatatacatttttaaaggaccttacatgcttctatgtcatcaaaaagccttcattcattcaacaaacatttatttccggtgttctctgtgctgagtatcatggtaacaaaaagaaacgtcatagcccatgccttcaggctatttgcattgcatatgggggaatgaaagaagtaaacgtctatgatacagtagaatgtatcacattatgagcacaaggcaggaaataatgataaatgaatggggtagtttatcaggaaagatattactgaggaggaaatatttaactgggttttgacaaatgagtaggagtttgcagagtggacaaaaaaagacgacacattccaagaagatgaagcagtttcagcaagcttagcaaattttgttctttaccactttcttggctacactaagacatattaggcttactttctctttaatcttggacaagcattttgtttgtttgttttagctttttaatgcttcttttgagtattctgctaaaagagcaataagaatgtacactactttataaggttgtaataaagagtgaaaatgaaaaagatatttagcacaatgtctggtacatagtcaatacttcacaagtaatatacataccctgaggatgtatggaacttatccacatactatacatttttattttagttgtttaatgaacataattgtaattcttttcatttttgccaaattctgtttcttatgcatgtgtcttatacaagtacctgcaggaaaaagaggagggtttatctgttctatacccagagtacccaatagaatgtcttggatgcatattattgaaggcttaataattctaaatattgtttacatataacaaatgcttttgtcaatgaataatccatcatgcagttttgatgatcaaaggtaaatcaaaacttcctactccaaatgcctatactgtaagacatacagaaaaatgtgtttttactcattaaaggcaatgagtcatggctaagtactttcacttggagtggtggaatgagatctgacacagagtttataacttccttaagatctgaccatctccccaaccattcaagaagcatacacggaatcagagtcatcttcattatagatgggacatccttctcccgaatgagtccttccttctaattcctttccaacatttcatctgaccaggacattatttgacaacaaaagacacattaacattataaaagttgtcccccatgatttgcagagagcaatctacaggtaggagggagaatcacatttagaaataaagtgtcagagtcatgtgaccagtgctttgtaaaagacactgcagagaccagggacaaaggtgacccccactaaggaagaaatatgacaagtgtttccaatagaaacacaggagcacagcaggaaaaggaaatgggttattttctctcttttggagtatttaagtagaaacacacaattatgtaattacatgattaagttttccacgaggtaaataataaggaaataatgacgtggtggcaatgggccttcagcagggtataaaggaggctatggacccagaagacttccaaacccaagaacttcactctcttggaaacccacccagatcctccccgttctgacaccatggtcagctcctgttgtggctccgtgtgctctgaccagggctgcagccaagacctctgtcaggagacctgctgccgccccagctgctgtcagaccacctgttgcaggaccacctgctaccgccccagctgttgtgtgtccagctgctgcaggccccagtgctgccagtctgtgtgctgccaacccacctgctgtcgccccacctgctgtgagacgacctgctgccaccctaggtgctgcatctccagctgctgccgccccagctgctgtatgtccagctgctgcaagccccagtgctgccagtctgtgtgctgccagcccacctgctgccgccccagctgctgccgcccctgctgctgcctgcgtccagtctgtggccgagtctcctgccacaccacttgctatcgcccaacctgtgtcatctccacctgtccccgccccttgtgctgtgcctcctcttgctgctgagcccactgccctggctcacgtcccccttcaccactggcccacagatgtagacccttctactgtgctgaccattaggatacatgaagtggggttgatgtcattcaataggatggaccttatgcttccaaagagcccaccaccatttcactgactctgtgagaacattctggttcattttaaactccctcctttgctttctttttcttctggtggtggcaccaaatgtgaattaatttgtaatacactagctaagaaattattccaatcttctgatttccttattttctttatcactttaaggtacagattctccttctcagtgaggtagatattatctgcaggaccagttttgtcactgatgttgcaccctcagatccagccacccaattgtattctgtgtttctcctagggtgaatttcttatgctttgttgtatctctgctttctaataaacttttctgcacttaagaattcattggtatcattctctattgctttcataattattttactgattccctggcaattatattttacacaaagacacaggaggagcaacccgtcttgaaatcattttgaagatacattctatatcaaatatagataatttaaggtattggaataaaagtgctgtgtgtatatgtgtgtgtatgtgcacatgtgtcttaatattctaaattaagacatttaattcatgccttagctcttgaaacacattttatcatgaacacattatatctcacaatactattgtccctattttgacaaaaaacataaaaccaaatttcagaaaagtagacaccaatgaaataagggaaatcttctataaagaatttaatgtactcgagtcatttcactcaataaacaacattttggaatttataaccaaaaagcgggctttatttcccagtgagttctgctgagaaaaaaaaagcatgttgagctgtattttatctggatagcatggtatatttctgacagtggtctctatgggtttacgttataatttaaacatctccacacttaacattttactatatataaacccagaaaggctgaaaatttcaaggctcacttttctttttaagaattattttcttgtagatttgtttgagttcattgtagattctcgatattagccctttgtcagatgagtagattgcaaaaattttctcccattctgtaggttgcctgttcaccctgaaggtagtttcttttgctgtgcagaagctctttagtttaattagatcccatttgtcaattttggcttttgttgccattgcttttggtgttttagacatgaagtccatgcccatgcctatgtcctgaatggtattgcctaggttttcttctagggtttttatggttttaggtctaatatgtaagtctttaatccatcctgaattaatttttgtataaagtgtaaggaagggatccagtttcagctttctacatatgactagccagttttcacagcaccatttattaaataggggatcctttccccatttcttgtttttgtcaggtttgtcaaagaccaaaaaacaaacagccccatcaaaaagtgggcaaaggatatgaacagacacttctcaaaagaagacatttatgcagccaaaagacatataaaaaaatgctcatcatcactggccatcagagaaatgcaaatcaaaaccacaatgagataccatctcacactagttagaatggcgatcattaaaaagtcaggaaacaacaggtgctggagaggatgtggagaaataggaacacttttacactgttggtgggactgtaaactagttcaaccattgtggaagacagtgtggcgattcctcagggatcttgaactagaaataccatttgacccagcaatccattactgggtatatacccaaaggattataaaacatgctgctgtaaagacacatgcacatgtatgtttattgtggcattattcacaatagcaaagacttggaaccaagccaaatgtccaacatagactggattaagaaaatgtggcacatatacaccatggaatactatgcagccatataaaatgatgagttcatgtcccttgtagggacatggatgaagctggaaaccatcattctcagcaaactatcgcaaggacaaaaaaccaaacactgcatgttctcactcataggtgggaattgaacaatgagaacacatggacacaggaagggaaacatcacacacaggggcctgttgtgggggtggggggaggggggaaggataccattaggagatatacctaatgttaaatgacaagttgatgggtgcagcacaccaacatggcacatgtatatatgtaactaacctgcatgttgtgcacatgtaccctaaaacttaaagtataataaaaataaataaataaataaataaattgagaaaaaaaagaatttttttttgaaattagttcatagccttgagtaggtcgcagctggggtgcatatcctaattagaatcttcaagagtagtgccttcatttgaatctgaaagaatatggtaagtgattataacttggcattctagtaggagcacctgctcttgatgtttttacttttacttgacaattatcagctctgaagtgccctaagctattgagccaatcaagtttaagatgatttgttcagatatcattgataagcttcacattttttcagatgccttaagaaaattgttgcccagatcttaatcatagagttatgatgccttcttaaacatgaggcaggataaataaggttagaaggctgtgaaagtaaaataaatattggggcccccaaatcactaagctaaagggaaaaggcaaactcagaactgcttagggaaaatctgcctctcattctattcaaagtcacccctctgctcactgagataaatgcatatctgattgactccttgggaaagactaatcagaaactcaaaagaatgcaaccatttgtctcttatatacctatgatctggaagccccctcccagctttgagttgtcccgcctttgcttcgagttctcctgccttttctgaaccaaatctgtgtttatcttacatatgttgattgatgtctcatatctctctaaaatgtataaaacaaaagtgttatctgaccaccttacacacatgttgtcaggacttcctgaagctgtgtcactggagcagcctgaagctgtgtcactgaagcatcctcaaccttggcaaaataaactttctaaattaactgaagcctgtctcagatattcagggttcacatttttgtaattctgaagggattctgagtggagatgcacctgacctttgacaaatatccagttggtacctggtaatagcatgagccaaccttatggctcaaaccaagaggacaatttactgagttctggaagcaccctccccaaagaatccatgatctcccaaaatttggtgaagatctaaagtgtattttgctgtacaacttccccatctattttttttttttttttttggagttgagttttactggcttacttgccttcctttacaaggaaggcaagatttattttacttcctttacaaggaaggcaagatttcctgcttccatgatgatgaaacgcatgtagagtttgagctcactcccagcagggaacaccagtttgagtttttttcctgcttctaggatggtagaaagcagccttcagcctgagacccatccctacgtaagtagctgaactggggctttgtcttggctaaagtttaacaaccagctggtcttaatttctccttatcattagaatgcttggtaatcgtattgttggacattttgttgtttgttttggtctttctcccatcagacttgaccaactctacctgacttggtcaaatccaagtgagaattcaaaattatgggtaacaaagcctctttaatttggctaaaattcattacagctgcaaaagaagaaaacaaacaaaaagaaccaaaaacccatgcacttggtttctgtgtttgcttcctgccttagaaaacaaattttctttcatttacttttcttccaccatatacctcctccccctttgccatttgcagtaccaaaaaatctagagaaggcttctaatgacttgaactcccttaaagaatcagaacaaaggtcgccactcaccccttttggggtgttttgttttctttgtggagtttcaagagtcatgggtagatacttcttaactctaaacctctattttcctgtattgcatgacctgacctctttggctttgaccttgctgggtataatggtagatgacagctacagagttaaggggtgtctgagcacagtttacaaaaagtggtcttggctgttgtttcgttttccttccaggaagttgttgtttaaaaatcctaattctagttcagagatgcattctaaagggtcctctctgttgctttttctccacaaattaagctcgattcggcttgtctgtgtgcatttgcatgaggaactgaactgttgttttcagtggtgacccactgtggagtcctgcccacaaatggcacatattgatccaccacagaaaacctctaggcctcagctcagttcctctttttaagaagaaaactgggaaacaaataatctaagaatgaggagaaagcaaagagaatgattccctttcaagcactccataggttttatggcacctgtacttgccagagtttaagtaaaatggaagtaatatggtctttgtgcatatttacattaagaaagaaagggcccatgtaaattagttcaaccattgtggaagacagtatggtgattcctcaaggatctaaaatcagaaataccatttgatccagcaatcccattacttgttatatacccaaaggaatacaaatcattctactgtaaagacacaggcacatgtatgtttattgcagcactatttacaagagcaaagacatggaactaacccaaacgcccatcaattatagacttgataaagaaaatgtggtacatatacaccatggaatacgatgcagccataaaacggagtgagttcatgtcctttgtagggacatggatgaagctggaaaccatcatcctcagcaaactaacacagaaacagaataccaaatacaacatgttctcactcacatatgggagttgaactttgagaacacatggacacagagaggagagcaacacatatcaggggctgttggggggtggggaatgagaggagggaacttagaggatgggtcaataggtgcagcaaaccaccaaggcacacatatacctatgtaacaaacctgcacgttctcctgcatgtatatttcatttttttttagaagagaaagaaaagaaggaaagaaagcaagaaagcaagaaagagaaagaaagaaagcaagcaagcaagaaagaaagaaagaaagaaagaaagaaagaaagaaagaaagaaagaaagaaagaaaagaagagccttaaggtggacctacaaactacagagttcctaagttctcttttttctctattttcttttctgcctgctttaaatctgctgttatttttctattaagatcaaaaccactgtttggatacaacagtttttttgcttgcaagctggtgaatttgtatttgtctcatggctaaagttctgaagtaaaagctataggatgtgtgtgtgtgtgtgtgtgtgtgtgtgtgtgtgtgtgtatttaaaaggcctttataatttttataattttatgtttatttggcaatgaagtccattttaatttccctctagcaccaccagactttttctctctgtaccttaagacataaattttgctctttgatttttgcctgagttgtttcctttaatatgcaaacttaaagccatttagctgacaacttcctaggggattaaaacaggttattgagaatttgaaagtctaagatagtggaaaaatcttcttatgaatctataagatgtacttctatcaacatgcctactaggtctatgtatttatgtgttgtgtacacaatgtctcactactgaaaatatataaaagggctctaattaattggcttaagaaaaaaagcacttaaatcaaatacttattaggaaaaaagaaaagactagttgaatgctttctcaagtttatgtaacttaagtaaaatctttaataaataagctacttttaaaatgattggtaaagtaatattagacatgtcttaagaattgccagcatgcattttgtttgcatttattaatcaagcaatttcatgtttatccctgtcaaatactataaggtgtcaaaatttggcatggggttacaaaactgtgatagaatgatctttgcttgtgtaatctttaataaataagacattgatactggtttaataaaaatagccacatcttgaatttagtcagattaccataacttctaatcttgtggcttttagtggtctagtccacaggcagtaatatttactttgggaatgaaatattataatctttgtttcaaaggtaaactataaactattttcctctcaaagtctgttcagcctgtgctggtaagaaagcttaaagagaaataatttcatatgagaaagaatcttgtatggtaaatttagacctaaaataaaatgactgattgtttaagaaagatggatgttcaaaacaaactagatagtccaagcatatcatgaacagtctctataagtcataagaggatttattttaaaaaaataccaaaaaacttttatatgattgagttgtctataattaaagggaaattataatggtcttcctgaagattgggcttcatgctaaaaaaaacacttatagactaaataattagttacagcgatgaaattttcttaagggattgatttactcttaataaattataagagattttaattttttaacccaaagttcaactatttacttgctgttttctctccccttcaacttgttttcagctcatataagttattttccttaagttctgtttgttgtggcctgatgctaacaatgttttctaaaagtctaaaggaaatgttttcttccaaagtaatactctgtgcagtgtagaaggtcttttcttttgccttttggtaattgacctaacagattttatggcttattgaaacaattcctatgccattattattaatttttggtttgcttaggaaaaagaaactgagacaatttttttaaaaaattaacgttattacatccatgtatatttctgtgtgcactttgaaagtacctgtgacattgagttaccggcctttaactcctggatctaaaaaggagaccaagatctgctaaatcttaaacactgacagcaattaaaacctcatcttcaggcctggtagaagatgcctatcaaaataagctgcatttctgagacataaggccataaatcaaagctattcaactcttcaagactcaggaacaatcacagaagaggtaggcatgtgagattataagggctgattttgagagataaaataagttcagtctctatacaagttaataattgatgtcaaaggcacactgatgcaataccagcatatgggcccctgtgtcagattaacaaggttttcttgaagtgttaactgaccccttaataaaggttataaaggttataaaaggcttatgaaagttgtatcttatggtcaagattaaaatgttatagattgtttaaaaaattttgaaaaacaaatttaattggctttatgctgttttatttgggcttattgtttgaaaaattgacttattttatgatgacctgtcatatcaagtgttttaaacctttgatatttgacaaactttccaaaatcaaattacaagttgtgtatttttctgacctaattaatcctttaagatattagtttccctcaagtccaaaaatgaaataatttgacttatttggtataaaaattatacaggaagcattgtcaaatataaaatggtgtttggttttatttgggctgtatttgtataaaattgttattggtatgtgcaccaaaattatgggaaactcctataattctgatatgacctggtgtacattatcagtaataattatgattgttatattaaattattgtgtgccatggtggtaacaaattttcttgtcaattgtatcttcgcctatggctgacctaaaactttttgtcacccatggacaatttttgtcttgttttagtcctctttagaagatggttttataatcagctataaaactctaacaggtattcttgaatgcaggtttctaataactctggagattgtgacatcacaatgaaggaaaagctttcaggactcatggagacctgaaatgttcatgaatagcaagcagaacaggaattaactgcatgaactgaactaacagaagactgaagtaatctttttgactttttgcttaaaacattgctgaccctttattttgtttttttcagtcaaggaaacttttcttttgagctgttgtcagcttttaacaagttagtatactcctgtgaaaaatatttggagcatatttgtttctctctacctgattttccctagaattggaaactatctgtgagtattcttaacttatggcaatacagttatttgcgtaagtgcaataagaatctgttttcatttgtaacaggacacgataaattggtcattttaccaaggcttttacttgaatggtgtgctcttctttgaggaatcaaacttgacttatggagccaataaaagccccttgggagaactggcctcataccttatctacacagtccctgtacagggttcctgacctgtggtaagtaaagcatgtcactttctaacagttccaggagccccaagtttatcttggaacctcaagaggagaggaattcacccaactcataggtatttgatggtacaaatccatggctaggctaagctttccaaaagtcttatccgaaattccttctatggaacaaagttctgatagggccaggggacagagaaattctaggcagaaaaggataggtctctgacaaaaccccaccttcaagctgaaaagccttaaaccatggcccaaagtgacaacttatatccctgttttcctgcttgaaagttgcctttttctaaaccactcatggccccatcctgtcccatcctgtgcctgtgaagatctcagactgagctggcagaggcaagaagcagctggatgttggggactacagccggacatcagagagaagcagcttgactgcagagggacagcttgatggtgtaaccttggagaagaatccggctggatacagcctaactttgaggaagattacctacccaccccatcctttttcagctcccttcctgctaagagccactttcatcagcaacaaaatcccccacatttaccatcctttgattggttcatgtgacctcacctttcctggacacccgacaagagcttgggagccaggagagcagatacaaaaggctgtcacactggccttctgctcttgctgttggagggcagctgcctcatgcaaaaaggcagagggctcactgagctgttgacacttaagccatccatggaaggcagagttaaaagagcactgtaacatgacttctggggctatgggagttgcaggcacctccacctagatgctgctgtggggcccgcacagagtttgctcctgccagcacccaaaagcactcactctggctcctgcacccattcacctgcatgcttccttccatgagcaggggactgcagcaggtccaagtgagtgaagtttgatcctgcagcactgaagtgctgattccagcactcatgcactccagttcctgcctcatttgcttgcatgctctctcctgcaaggaggtgagagtggcaggctgaataaatgaggccctgtcacaagtcccacagaagggtcagggaaacatcctgcttcgcttccatcaaagagaatttaaaagcttatgcaaaaaaattattactattactatgactgtgctgtatacaataatcaggtcaagtataataaagcaaatcagctctgccatgatttgtctttagtaaaaatggtaaatgggagagagaagaattgtttcaaaaaatgatagtacacctgttgttagattctagtcttgcctaatgtttttccatttttattaatttttacagtttggactgaattctaatttttcttggctacaggtcttcaaaagattgtcttcagtttttttcttcttcttctttccaccatttttcctaatttggagtcaccgaaaactcatctgtgcttttataaagccctgtgaactgcagctataagatttaaacttcagaagaaaatattagcaaccttttcacatacgtgagcctctttcatacctgcctactgatatatggacttccgagtaatgtggcccatattgattttccaggattgttcttttgtttatttttgtttttctcccttcctttccctattttctcttcataggacatgaaacttcacaacctgctaaaaatgaactttcctaataactcaggaattatctttctaggaataaacaatcctagccatgagatatcagatgaaacttgagaccaaagactgactttcttctaaaatgctttctcaaaaagatttttaagaagaaatgggcggaaatgtgaaaggaaaataaaccttggggccctgaaatcactaaggtaaaggggaaagtcaagctgggaactgcttagggcaaacctgcctcccgttctattcacagtcacccctctgctcacagagataaatgcatatctgattgcctcctttggaaaggctaatcagaaactctgaagaaagcaaccatttttctcttatctacctatgacctggaagcccctccccacttagagttgtcccggccttttccggacggaaccactgttcatcttacatatgttgattgatgtctcatgtctccctaaaatgtataaaaccaagctgtgctctgaccactttgggcacctgtcttcagaacctcctgaggctgtgtcacaggtgtacatccccaaccttggcaaaataaactttctaaataaactgagacctgtctccgattttgcgggttcagaaggctatactgaattgtcccctgtgtgaagcccagcaggagcctttcacagcaggttcttttcacttgaacctttgtgcatcagcacctaactctttcgcaagataaggggtcctacggaataccagcagacccaccagagggttacaaattcctgatacctagtacaacctgggaaagagagcaaaagccctttattcctgatgtagcttccccaatctctagccaatttgcaccaaaagcccaagaaactcctaactacaaattccttccaggggtggggtgtgtgggagggtgggcagggacttctctggggtcctgcatgcacagctaggctcaaggttcagcttatagtaaccttttcctcattttaatagtaaaaacagccacaacaagaaaaacacccctaggcggagatttcatatgctaatgatacatgcaatgggtgttacaccatgttgatcctgagcacatgtgccaaccgcaggtctgcctttgcatacttgacctcaccggtactttttgattatgtacgtatagctctcatgagaggaattccttttacagcactagctgctgtctctcccattgagcagcccactctgcctctcaaagggtacttttgctttgcaacaaacttcttcgcttactcttactttggatttgctctcaaattctttcgcgcagcaaattcaagaatctgaactggtccaccaacaacaaaataacaaaattcccttatataacatttggagtctgccttaactgatttgaatcaagatggaatgcagtaggatgagatgtactttttaaatttcacacagaagagtgaggagtattaccatgatatcataatttctaaaataatggatgaacttacaaacaacaatactgggggctttacctatcccaaagcattccgtatatcaaattgaaacaatgaaaagcttctattttattttagtttatctgtgacattactaggggttttacgtatcccaaaccattccgtatatcaaattgaaacaatcaaaagcttctattttattttagtttatgtgtgacattggagcagtttggcactatgatttcatccctgaagtcttactttggaatcatgctttgagaatccccttctactgcattcccacctcacccccatgaatcagtaaactcagtgaaaattatcacaaaaaatgcaaaaaacaataaaagatttctaaatgaaaagtttaatacaatatattttgtgaacacaataaagataaagaactaataaaatagaaaaattctgacaaacttgaacagtgagagaaagagagagcagggagaaagcgggagagcacgggaggggcagcctcctacctttccaaaagaaaagaatgactgaaaggctgacagacaaatagtatgtttgaaagggagataatgtgtacctaattgggaaggatattctgtaggctcaaaatgattttaaaaaatgaggaatttagaggattggaataatttcttagctagtggattacaaattaattcgtatttggtgccatgactggaagaaaaagaaagcaagggagggagtttaaaatgaaccagaatgttctcacagagtcagcgggatggtgatgggctcattggatacatgaggtccaccctgctgaatgacataaatcccactccatgtgtcctaatattcagcacagaagaatggtctacatttgtggaccagcggtgaagggagagatgagccagggcagtgggctcagcagcaagaggaggcgcagcacacggggcgggggcaggtggagatgacacaggctgggcgatagcaagtggtgtggcaggagactcggccacagactggacgcaggcagcagcaggggcggcagcagctggattcacagcaagaggggcggcagcagctggagatgctgcagctggggcggcagcagttgggctggcagcacacagactggcagcactggggcttgcagcagctggacacacagcagctggggcggcagcagctggagatgcagcagctagggtggcagcaggtgggctggcagcacacagactggcagcactggggcttgcagcagctggacacacagcagctggggcgacagcaggtgggctggcagcacacagactggcagcactggggtctgcagcagcaggacacactgtagctggggcggtagcaggtggtcctgcagcaggtggtctgacagcagctggggcagcagcaggtctcctggcagaggtcttggccacagccttggtcagagcacacggagccacaacaggagttgaccatggtgtcagagggtgaaggatctatttgggtttccaagagagtaaagttcttgagtttggaagtttcctgggtccatagcccctttatacccgcctgaaggcccgttgtcaccacgtcattatttccttgttattatttacctactgaaaaaattaatcatgtaattacatcattgtgtgtttctagttaaatactccaaaacagagaaaataactcatttccttttcctgctgtgctcctgtgtttccattggaaatgcttgtcatatttcttccttggtgggggtcacctttgtccctggtctatgcagtgtcttttacaaagcactggtcacaggactctctgacattttgtttttaaatatgactctccctcctacctgtagattgctgtctgcaaataatgggggacgatttttataatgtgaatgtatctttcattgtcaaagaacgtcctggtcaggtgaaatgttgggaaggaattagaaggaaggactcatttgtggaaggatctcccatctgtaatgaggatgactctgatcccgtgtgtgcatctcggatggtcgggcagatggtcagatcccaacaagttctaaactctttgtcagatcttattccacagcctccagcaaaagtacttacccatgactcactgcctttaaagggtaaaaacacattttgctgtatttcttacagtataggcattaagagtaggaagttttgatttatctttttttttttttttttttctgacggagtctccctctgtcaccaggctggagtacagtggcatgatctcggctcactgcaacttccacctcctgggttcaagcagttccttttcctcagccttccgagtagctgggactacaggtgtgtgccaccacacccagcttacttttgtatttttagtagagacagggtttcaccatgttggccaagatggtattgatctcttgacctcatgatccacccgcctttgcttcccaaagtgttgggattgcaggcgtgagcccccaacacccagcctgattaatctttgatcatcaaaattgcgtgatgcatttttcatttacaaaagcatttgttatatatgaagaatatttagaattattaagccttcaataacatgcatccaagatgttctattgggtactctgggtgtagaacagataaaccctcatctttttcttgcaggtacttgcataagacacatggataggaaacagtttggcagaaatgaaaagaattacaattattttcattaaacaactaaaataaaaaatgtataatatgtggataagttccatacaccctcatggtatgtatattacttgtgaagtattgactatgtagcaggcattgtaccaaatatcttacatttgtttcattttcacactttaatacaaccttatgaactagtttatattcttattagtcttttaggggaatactcaaaagaagcattaaaaacttaaaacaaacaaacaacttgtccaaggttaaagagaaagtaagcctaatatgtcttagtgtagccaagaaagccctaaagaatacaatttgctaagcttgctgaaactgcttcatcttcttggaatgtttcatctttttttgtccactctgcaaactcctactcatgtgtcaagacccagttaaaatatttcctcctcaataatatctttcctgctaagctaccccattcatgtatcatgatttcctgccttgtgctcataatttgttacattctcctgtatcatagtcatttacttctgtcattccaccacgtgcaatgcaaataccctgaaggcatgggctatggcatttattcttgttaccatgatactcagcacagagaacactggtggtaaatgtttgttgagtgaaggaaggcttttgatgacatagaggcatgtaaggtcctttaaaaatgtatatatcttttgacttctggataaaagagaggaaaacattccaaacaaagagatcataatttcatttcaggaagactaaactaatttacgtggtaggtaacatgtcatctgataaataacatatgtggaaagttgtggaagttaagattcaatttatagaatgagacttgtttatagataaccaggaatacagtgttgaacgtgcatgcctatattcacacagtaaaaagacaggaaggaagtaaacgccagatggtagcactggttctccttcacctcctgactccctcgttttactcttgtcgattgaaataactattatttccagtttcgtatcagtcagccaaaaatgtttgttgatcatctgttgtcttaacttaaattctacccaatgcaaaccttgagaaaaatacctgggtgcacataatttatttgggggatgatcccaggaagcacaagtgaggaaatggcgaaagtaagacagaaaaggtagaaaatcccaacagtgtttgtgttaatggtaggacccccactgtgggcatctggggatgaaccccggggacaggcctgaggctggaggcacttggccaccatgattgcacacctacaaaatcctggagagtcagctgggtattagtatgaatcatgagatcagataaaatatgaacttatactaatctatagactttttatacactagcaataattgtctctaaaatttaatggagaaaaatcacactggggcctgtcgtggggtggggggaggagggagggatagcattaggagaaacacctaatgtaaatgacgagttaatgggtgcagcacaccaacatggcacatgtatacatatgtaacaaacctgcacattgtgcacatgtaccctaggactttaagaataattttaaaaaagaacaatgtgctcacaattctcaagagtaaatagaaaaatatgtaaataaatctgccaagcctatgtgaaggaaagtgttaatatttcctgaaggacataaaataacgtttgaataaatgtcagaacaagagatgtgcaacgaaagccaagttttcaaataaatacatacatgtgttatgcatgcatttaatgaggatgtatctcaatttgtaacattaggtattgaatgggattggcaaagaccgtgatgggaaacttacctttggttgcattcttttgtattgtctaaatgtttaaagagcatatatttgtgtataaatgatataaaaatccttagaaaataataaatttgatttatataaaattcataattttttctacagattctgttaagtatgttttctgctattatgtttacattcttatttctttcaggaactaaaatattaaaagtacatttcagtcagtcatttgagctctcaaattagctatcatgaatttcaaattgttttgggggacaggctgggttccccaggaagcagacactgagatggagagcaatatgcaggaggtttattgaagcatgctcttgggattaacactggggaaatgaggggaggggaggggaggggaggggaggggaggggaaagtgaagggagagaaggggaaggggaaggggaggggattaacactggggagaggaggggaggggaagggcggggaggggaggggagggcaagggaaaggaagaaagggaggggaacgggtggggaagggaaggggaggggaaggggaggggaggcacagcacaaggggtgggggcaggtggagatgacacaggttgggtgatagcaagtgacgtggcaggagactcgaccacagactggacgcaggcagcagcaggggcagcagcagctcgattcacagcaagaggggcagcagctgctggagatgcagcagctggggtggcagcaggtgggctggaagcacacggaatggcagcactggggtctgcagcagctggacacacagcagctggggtggcagcaggtcgtcctgcagcaggtggtctgacagcagctggggcggcagcaggtgggctggcagcacacggaatggcagcactggggtctgcagcagctggacacagagcagctgtgggagcaggaggtggttctgcagcaggtggtctgacaacagctggggtgacagcagttgggtgggctggcagcacacagactggaagcactggggctgcatggcatctttgaactgcacatagtaaaatgcaagaggaaagaaatgatttaaaggtggaattcataattaaaagggaaacagaacataaagatgtggaaaatgtggagactgaccatataaagaatgaaaaagcatgcaagattgtggccaagtaatgctttgttacaaggattgatatgaatagaaggaagctaggtgctgttcatcaaatcagtgggagaatggctctgaaggcatttcaaagatctttgaagctgtccctcccatcacaggctccaaatgagagaatcttaaggtcagaaagggtttggtactctccacattctagcacagtgcccctttgctgctccagttgtggctcaagtgggtttagatgagacttgcgctgctgctgcagaggccacaaactgtgagccttggtggtgttcatgtagtactgactgtagatacacagactgcaggagttgtggggcaatggtggtccacctaggtttgaaaggatgtttctgacagcctgccttaggggtgtagccacagcagagaggtcctcctagggccatgctcaggaaaacggggggtcagagcagccactgagaccctagaactgtagaactatcagcctgcaatactagcctgagagagctgcagcagagactccaatcagatagctgctgtatgggctgagcccagcaaagccatggggcagggctatctgagggcatttggggcctaacaccaaggccccaggcagcccttccccatgtcgggcacatccaggagacagcacatggagtcgaagtttattctccagtcttaagatttaatgctgtcttccctgttggactcacctggggccagttacccttttttctttcctgttgctgccttttggaatgggcctgtctatcctatgcctctcccaccattggattttggaactagataacttctttaataggttcacatatggaggagaatttgcctcaggataagtcctgtgttgagtcttattcatatcagagtcacatgagactcttagatttacattttgacttttaagttggtgctggaacaagttaatactttgggactattggaataaaatgaatatattttgtgtacgagaaggacatggatttgggggaccaagggtggaatgcaatggtttgaatgtgtccctcaaagttcatgtgttggaaacttgatcctcaatgccgcagtgttgggaggttgggcctaacaggagatgtttgggtcatggtgacaccaccctcatgagtggattaatgctgttatcacaaaagagggttccttataaaaggatgagtttgactccctctttctctgtctcaccctctctttttccttccacagtgggaagacacggtattcctggttatctataaccaagtctcattctataaacagaatcctaacttccacaactttccacatatgttatttatcaggggacatgttacttaccatagaaataagtgtagttttcctgaaatgaaactctgatccccttgtttggaatgttttcctctcttttatccagaagtcaaaagatatatacacttttaaaggaccttacatgcttctatgtcatcaaaaagccttcattcactcaagaaacatttatcaccagtgttctctgtcctgagtatcatggtaacaaaaagaaacatcatagcccatgcattcagggtatttgcactgtatatgggggaatgaaagaagtaaatgtctatgatacagtagaatgtatcaaattatgagcacaagacaggaaataataatagatgaatggggtagcttattaggaaatatattattgagaaggaaatattttaactgggttttgacacatgagtaggagtttgcagagtggacaaaaaaagatgaaacattccaagaagatgaagcagtctcagcaagcttagcaaattgtattctttatcgctttcttggctacactaagacatattaggcttactttctctttaatcttggacaagtattttgtttgtttgttttagctttttaatgcttcttttgagtattctgctaaaagagtaataagaatgtacctactttttaaggttgtattaaagagtgaaaatgaaaaagatatttagcacaatgtctggtacatagtcaatacttcacaagtaatatatatatacactgagggtgtgtggaaattatccacatactatacatttttattttagttgtttaatgaacataattgtaattcttttcatttttgccaaattctgtttcttatgcatgtgtcttatacaagtacctgcaggaaaatgaggagggtttatctgttctatacccagagtacccaatagaatgtcttggatgcatattattgaaggcttaataattctaaatattgtttacatataacaaatgcttttgtcaatgaaaatccatcatgcagttttgatgatcaaaggtaaatcaaaacttcctactccaaatgcctatactgtaagacatacagaaaaatgtgtttttactcattaaaggcaatgagtcatggctaagtactttcacttggagtggtggaatgagatctgacacagagtttataacttccttgagatctgaccatctccccaactattcaagaagcatacacggaatcagagtcatcttcattatagatgggacatccttctcccgaatgagtccttccttctaattcctttccaacatttcatctgaccaggacattatttgacaacaaaagacacattcacattataaaaattgtcccccatgatttgcagagagcaatctacaggtaggggggagaatcacatttagaaataaagtgtcagagtcatgtgaccagtgctttgtaaaagacactgcagagaccagggacaaaggtgacccccactaaggaagaaatatgacaagtgtttccaatagaaacacaggagcacagcaggaaaaggaaatgggttattttctctcttttggagtatttaagtagaagcacacaattatgtaattacatgattaagttttccacgaggtaaataataaggaaataatgacgtggtggcaatgggccttcagcagggtataaaggtggctatggacccagaagacttccaaacccaagaacttcactctcttggaagcccacccagatcctccccgttctgacaccatggtcagctcctgttgtggctccgtgtgctctgaccagggctgcggccaagacctctgtcaggagacctgctgccgccccagctgctgtgagaccacctgctgcaggaccacctgctgccgccccagctgttgtgtatccagctgctgcaggccccagtgctgccagtctgtgtgctgccaacccacttgttcccgccccagctgctgtcagaccacctgttgcaggaccacctgctaccgccccagctgttgtgtgtccagctgctgcaggccccagtgctgccagcctgcgtgctgccaacccacttgctgtcgccccagctgctgtgagacgacctgctgccaccctaggtgctgcatctccagctgctgtcgccccagctgctgtgtgtccagctgctgcaagccccagtgctgccagtctgtgtgctgccagcccaactgctgccgccccagctgcagcatctccagctgctgccgcccctcttgctgtgaatccagctgctgccgcccctgctgctgcgtgcgtccagtctgtggccgagtctcctgccacaccacttgctatcgcccaacctgtgtcatctccagctgcccccgccccttgtgctgtgcctcctcttgctgctgagcccactgccctggcttatctcccccttcaccactggcccacagatgtagacccttctactgtgctgaccattaggatacaggaagtggggttgatgtcattcaatagaatggaactcatgtttccaatgagcccatcaccatttcactgactctttgagaacattctgattcattttaaactccctcccttgctttctttttcttccggtggtggcaccaaatgtgaattaatttgtaatccactagctagaaattattccaatcctctaatttcctcattttctttatcactttgaggtacagatcttcttctcagtgaggcagacattatctgcaggaccagttttgtcactgaggttgcaccctcagatccagccgcccagttatattctgtgtttctcctagtgtgaatttcttatgctttgttgcatctctgctttttaataaaatttctgtacataagaattcattggtatcattctctattgctttcataattattttactgattccctgacaattatattttacacaaagacgcaggaaaagcaacccgtgttgaaatcactttgaaaatacatgctatatcgaatatagataatttacggtattggaatagaagtgctgtgtgtatatgtgtgtgtatgtgtgtgtgtgtgtgtgcacatgtgtcttaatatcctaaattaagacagttttaattcataccttagctcttgaaacacattttatctttaacacattatatctcataatactatcgtccctgttttgacaaaaaagataaaaccaaatttctgaaaattagacaccaatgaaagaagggaaatcttctataaagaatttcatgtactgaattcattttactcaataacaacattttggaatttataatcaaaaagtgggctttatttcccagtgagttctgctgagacaaaaaagcatattgagctgtagttcatctggatagcatggtatattgctgactgtggtctctacgggtttacattataatttaaacaactccacacttaacattttaatatatataaacccagaaaggatgaaaatttcaaggctcgcttttctttttaagaattattttattggaattagttcagtcttgagtaggtcgcagctggggtgcatatcctaattagaatttccaagagaggtgccttcatttgaatctgaaagaatatggtaagtgactataacttggcattctagtaggagcacctgctcttgatgtttttacttttatttgactattatcagctctgaaatggccttaagctattgagccaatcaagtttaagatgatttgttcagatatgttcaaatatgaaaaataagcttcatattttttcagatgccttaagaaaaatgttgtccagatctcagtcatagagttatgatgccttcttaaacatgaggcaggataaataaggttaggaggctgtgaaagtaaaataaatattggggcccccaaatcactaagctaaagggaaaaggcaaactcggaactgcttaggacaaacttgcctctcattctattcaaagtcacccctctgctcactgagataaatgcactgattgcctccttgggaaaggctaatcagaaactcaaaagaaggcaaccatttgtctcttatatacctatgatctggaagccccctcccagcttcgagttgtcccgcctttgcttcgagttgtcttgccttttctggaccaaatccgtgttcatcttacatatgttgattgatatctcatgtctccctaaaatgtataaaacaaaagtgttatctgaccaccttacacacatgtcatcaggacttcctgaggctgtgtcaccggagcatcctcaaccttagcaaaataaactttctcaattaactgagacctgtctcagattttctgggttaacattttggtaactgtgaaaggattctgagtggagatgcccttgacctttgacgaatatcctgttggtgcctggtaatagcatgagctaactttatggctcaaatcaataggacaatttgctgaggtctgggagcaccctccccaaagaatccctgatctccccaaatttggtgaagaactaaagttcattttgctgtacaactgccccacctatttttgtttttggagttttacttgcttacttgccttccttataaggaaggcaagatttacttttacttcctttacaaggaaggcaagatttcctgcttccatgatgatgaaaggcatgtagagtttgagctcactcccagcagggaagaccagtttgagtttttttcctgcttctagggtggtagaaagcagccttcagcctgagacccatccctaggtaagtagctgaactggggctttgtctgggctaaagtttaacaaccagctagctgctcttaatttctccttatcattagagtgcttggtaatcctatggttggagattttgttgtttgttttggtctttctcccatcagacttgaccaactctacctgacttggtcaaatccaagtgagaattcaaaattacgggtaacaaaacctctctaatttggctaaaattcattgcagctgcaaaagaagaaaacaaacaaaaagaaccaaaaacccatgcacttggtttctgtgtttgcttcctgtcttaaaacacgaatgttctttcgtttacttttcttgcaccatatacctcctccccctttgccatatgcagtaccaaaaagtctagagaaggcttctaatgacttgaacccccttaaagaattcagaacaaaggttgccactcaccccttttggggtgttttgttttctttgtggagtttcaagagtcatgggtagattcttcttaactctaaacctctattttcctgtattgcatgacctgacctctttggctttgaccttgttgtgtatagtggtagatgagagctacaaagttaaggggtggctgagcaaggtttacaaaaagtggtcttggctgttgttttgttttccttctaggaatttgtcgtttaaagatcctaattctagttcacaaatgcattctaaaggatcttctctgttgctttttctccccaaattaagctcaattcagcttgtctgtgtgcatttgcatgaggaactgaactgttgttttcagtggtgacccactgtggagtcctgcccacaaatggcacatattgatccaccacagaaaacctctaggcctcagctcagttcctctttttaagaagaaaactgggaaacaaataatctaagaatgaggagaaagcaaagagaatgattccctttcaagcactccataggttttatggcacctgtacttgccagagtttaagtaaaatggaagtaatatggtctttgtgcatatttacattaagaaagaaagggcccatgtaaattagttcaaccattgtggaagacagtatggtgattcctcaaggatctagaatcagaaataccatttgatccagcaatcccattacttgttatatacccaaaggaatacaaatcattctactataaagacacaggcacatgtatgtttattgcagcactatttacaagagcaaagacatggaactaacccaaacgcccatcaattatagacttgataaagaaaatgtggtacatatacaccatggaatacgatgcagccataaaacggagtgagatcatgtcctttgtagggacatggatgaagctggaaaccatcatcctcagcaaactaacacagaaacagaataccaaatacaacatgttctcactcatatatgggagttgaactttgagaacacatggacacagagaggagagcaacacatatcaggggctgttggggggtggggaatgagaggagggaatttagaggatgggtcaataggtgcagcaaaccaccaaggcacacatatacctatgtaacaaacctgcacgttctcctgcatgtgtatttcatttttttttagaagagaaagaaaagaaggaaagaaagcaagcaagcaagaaagcaagcaagcaagaaagaaagaaagaaagaaagaaagaaagaaagaaagaaagaaagaaagaaagaaagaaaagaaaaagaaagaaaagaagagccttaaggtcaacctacaaactacagagttcctaagttctcttttttctctattttcttttctgcctgctttaaatctgctgttatttttctattaagatcaaaaccactgtttggatacaacaggctttttgtttgcaacctggtgaatttgtatttgtctcatggctaaagttctgaagtaaaagctataggatttctgtgtgtgtgtttgtgtgtgtgtgtgtgtgtgtgtgtgtatctatttaaaaggcctttataatttttataattttatgtttaattggcaattaaatccattttgacttccctctagcaccaccagactttttctctctgtaccttatgatataattttgctatttgatttttgcctgagttgtttcctttaacatgcaaacttaaggctatttagctgacaactccctaggggagtaaaacaggttattaagaatttgaaagcctaagataggggaaaaaagctccttaagtatctatacgatgtacttctatcagcatgcctactatgtctatatatttatgtgatgtgtacacaatttctcgctactgaaaatatataaaagagttctaattaattggcttaagataaaaagcacttgaatctaatactttatcaggaaaaaagaaaagactagttgaatgctttctgaagtttatgtaacaagtaaaatctttaataaataagctagctttaaaattattggtaaagtaatattagacatgtcttaaaaattgccagcatgcatttttgtttgcatttattaatcaagcaatttcatgcttatccctgtcaaataccataaggtgtcaaaatttgccatggagttacaaaactgtaatagaatgatctttgcttgtataatctttaataaataagacattgatattggtttaataaaaatagtcacatcttgaatttagtgagattactgtaacttctaattttgtggttttggtggtctagtccacaggcagtaagatttagtttgagaatgaactgttataatctttgtttcaaaggtaaactataaactatgttcctctcaacgtctgttcagcctgtgcccaggattgaacaagaacagtttggaggttagaagcaagatggagtcaattaggtcagatctttttcactgtctcagttataattttgcaatggcagttccataactttaaatgatgactattgcagttttcataaataatctaggtaaacaattcctttttaaaaaggtgaacaattgtcatctaattcaatgcttatttaaagattatgtataagacaagttaaaaggaaccaggaaatcagagagatgtaaagaaaggtataaaaataaagaggataaagagggttctttttggtaaggaagcttaaagagaaataatttcatatgagaaaagatcttgtatggtaaatttagacctaaaataaaatgattgtttaagaaagatggatgttcaaaacaaaccagaaagtccaagcatatcatgaacagtctgtaaaagtcataataagaggattaaaaaaaaaaccaacaaacttttatatggtcaagttgtctgtaattaaaaggaaattataatagtcttcctgaagattgggcttcatgtaaaaaaaaaaaagcaatgataaacaaaatagttagagcgatgaaattttcttaagggattgatttactcttattaaattataagagattttaatttttttaacccaaagttcaactgtttactcgctgttttctctccccttcaactcgtttgcagctcatataagttattttccttaaattctatttgttatggtctgatgctaacaatgttttctaaaagtctaaagaaaatgttttcttccaaagtaatattctgtgcagtgtagaaggtcttttcttttgcctttgggtaattgacctaacagattttatggcttattgaaacaatgctatgctgttattattaatttttgatttgctcaggaaaaagtatctgagataattttttaaaattaaggttattacatccatgtatatttctgtaggtgctttgaaagtacctgtgacattaagttacaggcctttgactcctgggtctaaaaaggacaccaaggtctgctaaatcttaagcactgacagcaattaaaacctcatcttcaggcctggtagaagatgccaatcaaaataaactgcattcctgagacataaggccagaagtaaaagctattcaactcctcaaggctcaggaactaccacagaagaggtaggcatgtgagattgtaagggctgattttgagagacaaaataagttcagtttctctgcaagttaataattgatgtcaaaggcacactgatgcaataccagcatacgggcccctgcgtcagattaaaaaggttttcttgaagtgttaaccgaccccttaataaaggttataaaggttaaaaaaggcttatggaagctgtatcttatggtcaagattaaaattttaaagattgataataaaatttcaaaaaacaaatttaattggctttatgctgttttatttgggcttaatgtttgaaaaattgacttattttatgatgacctatcaagtattttaaacttttgatatttggcaaagtttccagaatcaaattacaagttgtgtatttttctgacctaattaatcctctaagatattagtttccctaaagtccaaaaatgaaataaatgacttatttggtataaaaattatacaggaagcattgtcaaatataaaatggtgtttggttttctttgggctgtatttgtataaaaatgttattggtatgtgcaccaaaattatgggaaactcctataattctgatatgacatggtgtacaatatcactaataattataattgttatataaaattatcgtgtgccacagtggtaacaaattttcttgtcaattgtgtctttgattatggctgacctaaaactttttgtcacccatggacaattgttttgttttagtcctttttagaagatggttttataatcagctataaaactctaacacgtgttcttgaaggcaagtttctaataactttggagactgtgacatcagaatggaggaaaagctttcagaactcatggagacctgaaatgttcatgaatagcaagcagaacaggaattaactgcatgaactgaactaatagaagagcaacgtaatctttttgactttttgcttaaaatgttgctgctccttgttttcctttttttagtcaaggaaacttttatttgagctgttgtcagcttttaacaagttagtatactcctgtgaaaaatatttggagcatatttgtttctctctacctgattttccccagaattggaaactatctgtgagtattcttaacttatggcaatacagttatttgcataagtgcaataataatctgttttcatgtgtaacaagacacaattggagaaattggtcattttaccaaggctttgactggaatggtgtgctctcctttaaggaatcaaatttgacttatggagccaataaaagccccttgggagaactggcctcataccttatctacacagtccctgtacagggttcctgacctgtggtaagtaaagcatgtcactttctaacagttccaggagccccaagtttatcttggaacctcaagagcagaggaattcatgcaactcataggtatttgatggtacaaatccatggctaggctaagctttccaaaagtcttatccgaaattccttctatggaacaaagttctgatagggacagggggctgagaaattctaggcagaaaagggtaggtctctgacaaaaccccaccttcaagctgaaaagccttaaaccacggcccaaagtgagaacttatatccctgttttcctgcttgaaagttgcctttttctaaaccactcatggctccatcctgtccatcctatgcctgtgaagatgccagactcagctggcagaggcaagaagcagctggacattgggaactacagctggacgtcagagagaagcagcttgattcagagggacagcttgatggtgtaatcttggagaagaatccagctggatacagcctaactttgaggaagattacctacccaccccatcctttttcagctccgctttctgctaagagccactttcatcagcaacaaaatcccccacatttaccatcctttgattggttcatgtgacctcacttttcctggacacaagacaagagcttgggagccaggagagcagatacaaaagactgtcacactggccctctgcccttgctggtggagggcagctgcctcacacaaaaaggcagaggcctcactgagctgttgacacttaagccatccatggaaggcagagttaaaagaacactgtaacatgccctctggggctatgggggtcgcaggcacccccacctagatgctgctgtggggcccacacagagtttgctcctgccggtggccaaaagcactcactttggctcctgcactgattcacctgcatgcttcctcccacaagcaggggactgcagcaggtcccagtgagtgaagtttgatcctaccgtgctgcagtgccgattccagcacacgtgcactccagttcctgcctcatttgcttgcatgctcgctcctgcaaggagttgagagtggcaggctgaataaacgaggcacccgtcacaagtcccacaaaggggtcagggaaacatcctgcttcagttccatcaaaggcaatttaaaagcttatgcaaaaaaaaagtattactatggctgcgctgtatacaaataatcaggtcaagtataataaagaaaatcagccctgccatgatttgtctttagtaaaaatgggaaatgggagagagaagaattatgtttcaaaaaatgataatacacctgttgttagattctagtcttgcctaatgttttcccatttttattattttctacagtttccactgaattctaatttttcttggctacaggtcttcaaaagattgttttcagtttttttttcttcttctttcccccatttttcctaatttggagtcactgaaaactcatctgtgcttttgtaaagccctgcgaactggagctagagaatttaaacttcagaagaaaataccagcaacctgtttacatacataagccactttcatacctgcctactgatgtatggacttcagagtaatgtggcccatattgattttccaggattgttcttttgtttatttttgtttttctcccttcctccccctattttctcttcataggacatgaaacttcacaacctgctaaaaatgaactttcctaataactcaggaattatctttctaggaataaacaatcctagccatgagatatcagatgaaacttgagaccaaagactgactttcttcaaaaaggctttctcaaaaagatttttaagaaaaggggggaaatttgaaaggaaaataaaccttggggccctgaaatcactaaggtaaaggggaaagtcaagctgggaactgcttagggcaaacctgcctcccattctattcacagtcacccctctgctcactgagttaaatgcatatctgattgcctcctttggaaaggctaatcagaaactctaaagaaagcaaccatttgtctcttatctacctatgacctggaagcccctccccgcttagacttgtcccgccttttccggacggaaccactgttcatcttacatatgttgattgatgtctcatgtctccctaaaatgtataaaaccaagctgtgctctgaccactttgggcacatgtcttcagaacctcctgaggctgtgtcacaggtgtacatccccaaccttggcaaaataaactttctaaataaactgagacctgtctccgattttgggggttcacaaggccatactgacttgtcccctgtgtgaagcccagcaggatcctttcacagcaagctcttttcacttgaacctttgtgcatcagtgcctaactctttcacaagataaggggtcctacagaatcgaagcagacccaccagagggttacaagttcctgatacctagtacaacctgggaaagagagcaaaagccctttattcctgatgcagcttccccaatctctagccaatttgcaccaaaagcccaagaaactcctaactacaaattccttcctggggtggggtgtttgggagggtgggcagggacttctctggggtcctgcatgcacagctaggatcaaggttcagcttatagtaaccatttcctcattttaatagtaaaaacaaccacaacaagaaaaacaccccaaggcggagatttcatatgctaatgatacatgcgatgggtgttagaccacgtggatcctgagcacatgtgccaaccgcaggtctgcctttgcatacttgacctcaccagtattttatgattatgtacgtatagctcccataaaaggaattcctcttacagcactagctgctgtctctcccactgagcaccccactctgcctctcaaagagtacttttgctttgcaacaaatttcttcgcttactcttactttggatttgctctcaaattcttttgcacagcaaattcaagaacctgaactggtccaccgacaacaaaataacaaaattcccttatataacatttggagtctgccttaactgatttgaatcaagatggaatgcagtaggatgagatgtgccttttaaatttgacacagaagagtgaggagtattaccatgatatcataagttctaaaatcatggatgaacttacaaacaacaatactggggctttacctatcccaaagcattccatatatcaaattgaaacaatcaaaagcttctattttattttagtttatgcgtgacattggagcagtttggcactatgagttcatccctgaagtcttactttggaatcatgctttgagaatccccttctactgcattcccacctcacccccatgaatcagtaaactcagtgaaaattatcacaaaaaaatgcaaaaaacaataaaagatttctaaatgaaaagtttaatacaatatattttgtgaacacaataaagataaagaaccaataaaatagaaaaattctggcaaacttgaacaaacagagacaaagagagaacagggagaaagcaggagagcatgggaggggcagcctcctacctttccaagagaaaagaatgactgaaaggctgacagacaaataatatgtttgaaatggagataatgtgtacctcactgggaaggatattctgtaggctcaaaacgatttaaaaaatgaggaatttagaggattggaataatttcttagctagtggattacaaattatttcatatttggtgccatgactggaagagaaagaaagcaagggagggagtttaaaatgaaccagaatgttctcacagagtcagtgggatggtgatgggctcattggaaacatgaagtccaccctgctgaatgacatcaatcccactccatgtgtcctaatagtcagcacagaagaatggtctacaactgtgggcctgcagtgaagggagagatgagccagggcagtgggctcagcagcaagaggaggcacagcacaaggggcgggggcagctggagatgacacaggttgggcgatagcaagtggtgtggcaggagactcggccacagactggacgcaggcagcagcaggggcggcagcagctggattcacagcaagaggggcggcagcagctggagatgctgcagctggggtggcagcaggtgggctggcagcacacagactggcagcactggggtctgcagcagctggacacacagcagctggggcgacagcagctggagatgcagcatctggggcggcagcaagtgggctggcagcacatagactggcagcactggggcttgcagcagctggacacacagcagctggggcgacagcagctggagatgcagcatctggggcggcagcaggtgggctggcagcacacagactggcagcactggggcctgcagcagctggacacacagcagctggggcgacagtaggtggtcctgcagcaggtggtctcacagcagctggggcggcagcaggtctcctggcagaggtctcggccacagccttggtgagagcacacggagccacaacaggagtttaccatggtgtcagagggtgaaggatctagttgggtttctaggagagtgaagttcttgtgtttggaagtctcctgggcctgtagtccctttataccctcctgaaggcccattgccaccacatcattatttccttgttattatttacctactggaaaaattaatcatgtaattacatcattgtgtttccagttaaatactccaaaacagagaaaataacccatttccttttcctgctgtgctcctgtgtttccattggaaatgcatgtcatatttcttcattagtggggagtcacctttgtccctggtctatgcagtgtcttttacaaagcactggtcacaggactctctgacattttgtttttaaatgtgactctccctcctacctgcagattgctgtctgcaaatcatgggggatgatttttataatgtgaatgtatcttttgttgtcaaagaatgtcctggtcaggtgaaatgttgggaaggaattagaaggaagcactcatttggggaaggatgtcccatctgtaatgaggatgactctgatcccatgtgtgcatctcggatggtcgggcagatggtcagatcccaagaagttctaaactctgtcagatcttattccacagcctccagcgaaagtacttacccatgactcactgcctttaaagggtaaaaacacattttgctgtatgtcttacagtatatgcattatgagtaggaagttttgatttatctttttttttttttttgacagattctcaatctgtcgccaggctggagtacagtggcatgatctctgctcactgcaacctccacctcctgggttcaaacgattcttttgcctcagcctcccgagtaaggtggtttgcgccatcacacccagcttacttttgtatttttagtagagacagggtttcaccatgttggccaagatggtctcgatctcttgaccccgtgatccacctgccttggcttcccaaagtgttgggattgcaggcatgagcccccaacacccagcctgattaatctttgatcatcaaaattgcatgatggatttttcatttacaaaagcatttgttatatataaagaatatttagaattattaagccttcaataacatgcatccaagatgttctattgggtactctgggtgtagaacagataaaccctcaactttttcttgcaggtacttgcataagacacatggataggaaacagtttggcagaaatgaaaagaattacaattattttcattaaacaactaaaataagaaatgtataatatgtggataagttccatacaccctcatggtatgtatattacttgtgaagtattgactatgtagcaggcattgtaccaaatatcttacatttgtttcattttcacgctttaatagaaccttatgaactagtttatattcttattagtcttttaggggaatactcaaaagaagcattaaaaacttaaaacaaacaaacaaacaacttgtccaaggttaaagagaaagtaagcctaatatgtcttagtgtagccaagaaagccgtaaagaatacaatttgctaagcttgctgaaactgcttcatcttcttggaatgtttcatctttttttgtccactctgcaaactcctactcatgtgtcaagacccagttaaaatatttcctcctcaataatatctttcctgctaagctaccccattcatgtatcatgatttcctgccttgtgctcataatttatacattctcctgtatcatagtcatttacttctgtctttccaccacgtgcaatgcaaataccctgaaggcttgcgctatggcatttattctcgttaccatgatactcagcacagagaacactggtggtaaatgtttgttgagtgaatgaaggtttttttgatgacatagaggcatgtaaggtcctttaaaaaatgtatatatcttttgacttctggataaaagggaggaaaacatcccaaacaaagaaatcataatttcatttcaggaagactaaactcatttgtgtgataggtaacatgtcacccgataaataacatacgtggaaactgcggaagtcaagattcaatttatagaatgagacttgtttatagataaccaagaatacagtgttgaacgtgcatgcctatattcacacagtaaaaagacaggaaggaagtaaacgccagatggtagcactggttctccttcacctcctgacttcctcgttttactcttgttgattgaaataactattatttcctgtttcgtatcagtcagccaaaaatgtttgctgataatctgttgtcttagcttaaattctacccaatgcaaaccttgagaaaaagacctgagtgcacataatttatttgggggatgatcccaggaagcacaagtgaggaaacggtgaaagtaagacaggaaaggtagaaaatcccaacagtgtttgtgttaatggtaaggcccccactgtgggcagctggggacgaaccccagggacaagcctgaggctggaggcacttggccaccatgattgcacacctgtaaaatcctgtagagtcagctgggtattagtgtgaatcgcgagatcagataaaatatgaacttatactaatccatagactttttatacactagcaataattctctctaaaatttaatggagaaaaatcacacactggggcctgtcgtggggtggggggagggaggagggatagcattaggagaaatacctaatgtaaatgacgagttaatgggtgcagcacaccaacatggcacatgtatacatatgtaacaaacctgcacgttgtgcacatgtaccctagaacttaaagtataataaaaaaaaaaagaagcatgtactcacagttctcaagagtaaatagaaaaatatgtaaataaatctgccaagcctttgtgaaggaaaatgttaacatttccggaaggacataaaataatgtttgaataaatgtcagaacaagagatgtgcaacgaaagccaagttttcaaataaatacatacatgttttatgcatgcatttaatgaggatgtatctcaatttgcaacattaggtattgaatgggattggcaaagatcatgatgggaaacttacttttgttcacattgtcacattcttttgtattgtctaaatgtttaaagagcatatatttgtgtataaatgatctaaacatccttagaaaataataaatgtgatttatataaaattcataatttttctacatattctgttaaatatattttctgctattatgtttacattcttatttctttcaggaactaaaatattaaaagtacatttcagtcagtcatttgagctctcaaattagctatcatgaatttcaaattgttttgggggacaggctgggttccccaggaagcagtcactgagatggagagcaatatgcaggaggtttattgaagcatgctcttgggattaacactggggagggcaggggaggggaaagggaggggaggggaaagggaaagggaaggggaaggggagggaaagggaagggaagggaagggaagggaagggaagggaagggaagggaagggaagggaagggaaaggaagggaaagtgagagaaagatcaagtttgacactgggataaatcaaactgcagggcaatctccgtggaagtctcagatgaacctatagggagttctggagatgagatgacccattagaggcatccctagttggggagaaatgtgggtctttatagtttcatcctaaaaaaagggcatgactttggacgaaaagaaaaaaaatcagtctccagcatacctgtgagttttcactaggcctgcttccttcatttccatcacctgcctggccgtgaaggtggccctctctacatggcagcatgaactccccattgaaactctgccagtcagaatgaaggagatccactgtgtttgtgttgaggattcattacacatgactcagtagaaaatacatggactttgctaaaccacctaatagctgcttttactggaaaaaaaaagaaattgaaatacagtgttttaaaagatcacagctctgtgcacaatagtaaagacatggaatcagtctaggtgcccatcaacagtgcattggataaagaacatgtgacattttcacaccatggaatactacacagccataaaaaagaatgaaattttgtcctttgcagcaacatggatgtggctggaggacattatcttaagcaaatttttccaggaacagaaaaccaaatattgcatgttgtcacttacaaatgggagctaaacattggatacacatggacacaaagatgagaacaattggggactccaaaaaggggggagagagggagagaggaagggctaaaaatgacccactgctcagtacctggtgacagaatcatttgtagcccaaacctcagcatcacacaacatgtaacaaatacgaatatgtactctttgattctaaaataaaagttgaaattattttttaaaagatgatgagttgtgatcaatctttcaaaacgtttcccctgttgttatattcatggatatttcatgacttcagcttcactctttttgtctaaagaatacaaaatgactaattgatttgcctaagcctgaaaagacttttctagaaaaaaactaggcagtgatcgatgtcagttgacctctgttagaaggttgactaatctgtgctgtgagccctacaggtgtagttaaatgtaatcacccaggacctaaatataaaaccctttttaaaaagagaataagaatcatattcaattttcagtgccaatagaatagaggtttattttggtacatggaaataacaaggtacaaaaatgtttgcaaaagactttaagagagagacttcactggacttcaaggttggaggctttaagatctgtggccctacaaatgatggaggcaatcttcaaattccttaggcatgatgaataaatgtcctgaagtcaaagaggtgggaggatgttggaggacaatttgtcaatttattaggagattgtcaatgaattcctttggaaggaagggagtttggacaaaaggtagaatgcaaatacagaatttctaaggatgaggtttgcttatgggacccagatcaattctcttgaacagtccgcatgtttgcaatgagagccttcatctgtaggaaaggacgtaataaggaagtggtgtgttcacagcagagatttagcagcaagaggaggcacagcacaaggggcgggggcaggtggagatgacacaggttgggcgatagcaagtggtgtggcaggagactcggccacagactggacgcaggcagcagcaggggcggcagcagctggattcacagcaagaggggcagcagctgctggagatgcagcagctggggcggcagcaggtgggctggcagcacacagactggcagcactggggtctgcagcagctggacacacagcagctggggcggcagcaagtggtcctgcagcaggtggtctgacagcagctggggcggcagcaggtgggctggcagcacacagactggcagcactggggtctgcagcagctggacacacagcagctggggcggcagcaggtggtcctacagcaggtggtctgacagcagctggggcggcagcaggtgggctgacagcacacagactggcagcactggggcctgcagcagctggacacacagcagctggggcggcagcaggtggtcctgcagcaggtggtctggcagcagctggggcggcagcagttctccaggccacagccctggtcagagcacacagagccacaacaggagttgaccatggtgtcagagggtggaggttctcggtgggtttccaggagagtgagtgttctgagtttgatctctccttgttctctcttttgctttttataccctgctgagaaccactatgacaatgtgaataatcttgtggtttgcacattactaatagagaatcagttgttttttagtaaattagatagttgtccttatctggtaaatatttctataaatagaaaaggcaacatttccttttcctgttgtattctgagctatccaatttggttaagccaagtgaatcagctctcattctccttccttcatctgatgtgtcttctgatgtgtagacccattacatgacattgtttgattggatttcataagttaattctttatttatttgactcctggataataagttgaaaatagattttatgatgactaaatctcctctgctctcaaagaggttaaaaataaattacatagaatgctggtaggaaaatgtgatgaaagattcatctttggggggtgataggaggtaacttgtgtataataaggaacactgtgattcctttgaattttgtggctggtcagtgagatataaaagatcccactgaaattcctgtttcatgttattgactctatttagcttgaaacagatataatgcaatgattcattgctttacaagtaaaaatacattggcatgataggtccctttataaattattgttggcatgttcttcagagatggggatcataaggaacatttttgttctattttgttggtaagtcaagatacccactgaatgtgtttaactgaagtgttattgaaagtagattttctcatactcgaaagctgctttttctcacaatgtatgttggagatattttgcttgatacatggagaaaagaaacaaaggatcaagtttaatttctgtcctacagaagcttaaacaagacaaataagaaacatgtataggaaagaatttagcaactatttagagaatggtgtgattagtgaacaaaataacaattatgtatttaatctgtacacttccaatgaaagatgaaacaatactaatagttataattttttgagtgcttactatgtgtcaggaattttctgagtcctctataattgttatcttgtttatacttcacaaggattctgctatgtagacacaatttttctaaattctttacatccaaggtacttgaggcccagatagattgaagtcacacagtctgtaacagggaaagggcgtctctcctagagtgttcaaggaacattttgcgcatgaacattttgcaattaaatccctcctgatatttaaaaacaattatttataattaaaaagatgcaaggtatgttctcactcctaagtgggagttgaacaatgagatcacatggacacagggaggggaacatcacacactggagcctgtcgggggtgagggacaaggggagggagagcattaggacaaatacctgatgcatgtcgggcttaaaacccagatgacggattgataggtgcagcaaaccatcatggcatatgtataactatgtaacagacctgcatgttctgcacatgtatcccaaaacttaaagtaaaatttaaaaaaaaaaaatgtatggtaagaaaccatcataaacaaagtaaaaacacaaatgactaaataataaaaaaagaactagcaattaatatcacggacaaagggttaatagtatataaaagacttctgagactggacacggtggctcacacctgtaatcccagcactttgggatgccaaggcaggcggattgtttgaggttaggaatttgagaccaacttggttaacttggcaaaaccccatctctaccaaaaaaacaaaaaaaagcaaaaaaaaaaaaaaaaatggcgaggtggcatgcatctgtggtctgtggtcccagctactcaggaagctaaggtgggaggattgcctgagcccaggaggcggaggttgcagtgagccaagattgcaccactgcactccagcctgggtgacagaagaagaagaaaaaaaggcttctggaaatagatagaaaacagaccaacagcctaatgggaaaataaaatgcaaatattttaccaccatataaatatactcaatctcatgcatagtaagagaaatgaaataatatggtacgatacttctcacctgttagattatcaaaaattcaaaatctgatagcattctctggaagtgagatgatgtgaaaataggcatgctcgtatttgtcttgtgaaggtttggcaataactagcagcattattctttgactcagctatcccaattccataaaatatctcaaagatactcaggtaaatatatgaaagatattgcacaagacgattcataagagttctatttgggaaaaaaactaaaaactacaacaacactggatacaacccaggtgtccttcaatagggtactggtgtataaactgtggtgccttcccatgatggagtactatgcagctgtcaaaaggaataaggagtgtctctataggctactataaattaatctccagtagatattgttaggagacgataaagcagtggaggaaaatgtgtacaattgttctgcaacaatgttttaaaaatccaggatataaatattgaaagtatatttgcttacactttaaaaaacgacagaagaatagagagagaggagatgagaaaacaggaaagagggacttctgtcaaaacatcaaattgtgcattttaagtacatgcagtttatttattatatgtcaattgtaatttaatgtagctgaaaaaaaaagaaaaaaataatggaagaatcaaccacatttggttttgttgttgttgttgttgttgttgttgtttgagacggagtctcacgttgtcacccaggctggagtgcagtggagcgatcttggctcactgcaacttccacctcctgtgttcaagcaattctctgcctcagcctcctgagtaactgggattacaggcgcccaccaccacacccagttaatttttgtatttttaatagacatggggtttcaccatcttggccaggctggtcttgaacacctgacctcatgattccctgcctcagcctcgcaaaagtgctgagattacaggcgtgagccaccgcacccagcccatgtttgttttttaaaaattgacccatagaggatggagggaatagaatagagaagatagaaacagacactagattatttttgaatgtatctttttctgtagcttggactttgcacccatgtaaatattttacatacttataaaaatattaaatttttaaaatctctcaaaatcactaaaaccaccaccacaacaatggaatctaactgtatatccaggcataacttcagagaaagtaactatcccaaggccaaaatgtttttttcaaaaacctgttaagtttgtttgcaataactacactgttgttattagtattggcaatattattccaagattgttgtgcaagcattaggtaataaagaaaatgagtaattacatcaaggaactgttatttttggcaaggaataaaagagatttaggaaaaagatatgaggttaagtaaaaatcctgtaattatcagtagaaacgctgatgtactttatcttttaagcaaatattttctagttgtggacactgaaaaagttgagagaaaataatcaatttagtaatactcatcatttttacatttcaatctttcgtcccaaatgccatattcactacaaggaacaggggttccttggagaaatggctgaatataagtgtgggtaaggaaatatacaaatgaacctggaatatcttattatatatatattaaaaaaaatctactagattcacgtcaaaagtagccagagaccaacttgaagtttgttatttgagcaccaatggggatatgaactggaacccacaggttcatattgacaggagttaaaaaaaatactttggtcagctttgaatgatgttccattagcaagattaaccaagaaaagggagaaaaaatctaaataacctcactaagaaatgaaatgggagctattacaactgacaccacacaaatacaaaagatcattcaaggctactatgaacacctttatgcacataaactagaaaacctagaagagatggataaattcagggaaaaatacaaccctcttaacttaaatcgagaagaattagataccctgaacagaccaataacaaccagtgagattgaatggtaattaaaaaattaccaacaaaaaaaagtccaggactaggcagattcacagcagaattctactagacattcaaagaagaattggtaacaatccttttgacactattccacaagatagacaattaaggtatcctccctaattcattctatgaagccagcatcaccctaataccaaaaccagaaaatgacataaccaaaaaagaaaactacagaccaatatccttgatgaatatagatgctaaaatccttaacaaaatactagctaactgaatccaacaacatatcaaaaagataatccaccataatcaagtgggtttcataccagggatgcagggatggtttaacatatgcaagtcaataactgtgatacaccacataaacaaaattaaaaacaacaatcacataatcatctcaatagatgcagaaaaaacatttgacaaaatccagcatccttttattattaaaaccctcagcaaaatcagcgtacaggggacatatcttaatgtaataaaagccatctatgacaaacccacggccaacataatactgaatggggaaatgttgaaagcattacctctgagaacaggaacaagacaagggtgcccactctcccactcttcttcaacatagtactggaagccctagccagagcagtcagacaagagaaagaaataaagggcatccaaatcagtaaagaggaagtcaaactgtccctgtttgctgacagtatggttgtttaccttgaaaactctaaggattcctccagaaagctcctagaactgatgaaagaattcagcaaaatttccagatataagattaatgtacacaaatcaccagctcttctatacaccaacagcgaccaaacggagaatcaaatcaagaactcaacccctttaacaatagctgcaaaaaaaaaaaaaaatacttaggaatatacttaacaaaggagacaaaagacctttacaaggaaaactacaaaacactgttgaaagaaatcatagacgatagaaacaaatggaaacacatccaatgctcatggatgagtagaatcaatattgtgaaaatgatcatactgccaaaagcagtctacaaattcaatgccatccccatcaaaataccaccatcattcttcacagagttggaaaaaacaattctaaaattcatatgggaccaaaaaagagcccacataaccaaagcaagactaagcaaaaagaacaaatctggaggcatcacactatctgatttcaaactacattctaaggccatagtcaccaaaacagtgtggtactggcataaaaataggcacatggatcaatggaacagaatagagaacccagaaataaactcaaatacttacagccaactgatcttcgacaaagcaaacaaaaacataaaataatattcttattaatttttctccacagtttctctcattaattccatagtggattagagtatttgattattggcttgtcttatttttattcttatattaactgtagcttctgtatgtgaagttttatctctatatttatgtgttgattgtagcctttagcataatactttttcctactttgtcttctgtaatgctttttgtgtaagtctaacttgtgggatagaagaattgtagcccctgctttcttccatttgcattttcatatatgtatctctgtctttaccttttcacttttaaccttctgatgcttgttgattcacttgtgtctctttatagacagcataatgctgagctttccttttcataagccaatctgaaaatctttttttaaagtcagttgagcctattatatgtatggatataatcaatatgcttaaatttaattatgtcatttttattatacttatatataataatgatatataataagttatcttctatatttgttaaatatttctcttgcctgtctctttatctttctatctctctgtctttcacttttaaaattctaatctttcaccttttaaattctctctctttctcagtatgccttttggtatttaggaatgtttgtattttgtactaacggttacctttatatacctcatgagctctattttttagctactgtcagttgattctctgcttacagaaatattgaaattatctggttacctctttattcctcactccctgagcatgagatttgaattcctggttaatatctataaggcaatcagcaaacttctactttatatatttgctctccttttccttcctgttttggtagttgtgctgtatcaacattgtcagtacatagctgttagttatcacacttcctctcttaggcttatcgttcattctgttcttagttccaaaggatatatatcgatccagacctcatgtagatgtccttccagtatctttagtcatctgattttatgaagttcacttgttaataaattcttcaggatccacccatggtggagaatattcactgagttttttcatgtttataatagtttgtttgtggcctttatacctgaagttcagtttggctgaatttaaaatctttgcctcacattttctttccttgagcattactctattatcttctgacattttcatcaaaatgtgtgaaaacaagctcgttttatttccttctggttgacatggacattttgcctggatgttcaaatgattacttttctttaaataattattatgtttttctttaaaattcaaggcttttataacattatgtctcaattttgaccattatgagcttatttttccagaaggggtagctatacttataacagataaaacaaacttaaaatcaacaacagtaaaaacagagaaaggaggtcattatataataataaagggatcaattcagcaagaagatataacaattctaaatatacatattagtaagagagtgagcttagtaaatttgaaagtccctttgccacctgtccttttttgtgctctgctgaagcagctgtgaccatgtccgggatcatttcctactttattttcttatggagatgttggggctcagaaaacaaaaccccaaaatatgattctttggtaccttgattggggaattgtggggaacagcagctataagcagaggttttctctgaggttcccgtatctgcctgaagacatccaggaaagatatataacaggaaaagaggctaaatgttgacatcaccccagagcggctttgcctgaaagactttacctacatagcaagacagcctttgttcaccatacatttctttccctcaccttcccatagcttgtggacacctcccctaagaatccccaagaccctattctgatgctatacaaacttcaatcattggcccttcttcaagtcttatagtttgtgaggctctgcacatgcatgtaataaatttgtatgccttttctcctgttgatcagtctgctgtcacttttttccagagactcaaattctcacatctagagagtagagggaagtttaaaacacacctatacactatacacgaaattagatcattacgtttttctggttaaatattttaagatgtaggaaaatattatttccctttcctagtgtgttaagattttccaatctggactttctcacagaattatcttgcctatttctttgtctactgtgtcttctcaagatggcccatcacatggattcagtccggtatgtacctgtgatctgtgcatcacgccatgatcctgtttgggcaaattgttctcatgatgccaagatctcttttgatgtcaaagagaagcagaattagagtagggaaataaaaagaaacaagctcatctttctgagttagttaccggtgagcaatgaggaagacatatcctatttgtgagtcataaatgctcattagatagtggactctctagacttcttcaaagtatgcaccaggtatcatttcctttattcaatttgaaactgttaacaatgactcattgttttaaaatatgaaaaggcatttggagctactctgaataaactttcactggcctaatatgggacttgggcaccaaaatgaatattggcagtaatagattacaacccatcaaataaaattaaggattgatgagtccatattgatatgaattaaatggagaagttaaaaaaaggaagatgagaaagttatccatgacagtagaatgtcaatgagtaaatgtagaaggaataaaggagtttcaaatcaccatttacagccattataataaaacttgatcaagtgaatatcatcaatgaatgctataactattgggtggaagtttaatggggagcaggatatttgcacacttcaaaatattttcccaataactgtttattaatttcaaagggaaaatgttaactttactgtgaagaaacttgagaacatacccttcatcacaggatcaaagttagcagcattaataatggtcaaactagcatgtgtctcctgaagtcacacactgaaaggacacattacttatgcaatatttctgttaaaatgcaaaacctgaatataagcatgaggaaacatcagataacctcagactaagaaatactccacataacgactggtctgctatcttcaaaaatattagcaccatctaatataaagacagtctgagcaagtatttcaggtctaaataaagtaaggagatatgatagctaaatgcaatgtatgaacatggataaaaattgctttataggatatattggaaaaatggcaacatttggatatagcatgtatattaggtaataatattgcatcaacattcagtttaattgatatctttactgtggttatacatgaaaatgtccttagtcttaggacataagtctatctctatccatgtcatctctctagagagagagagaaatcaaatgtggccaaatgttgaatctaggtgaagactatatggcataaggaattctttactcttataactattctgtaagtttgaaatgttttcaaaaatgaaaaaagtttaaaaataaaacgaattaggattgaaaaagtattttttctttggcgtgttaaaagaaacatttaggcaaattaaatttaacagattttaattcatcaaagaataattcatgaattgggaagctcccagacaagcacaagttcggagcaactccttggcttccatttggttaaataacatttatggatagaaaaaggaaagtgatttgagtagttgcaactgagaccatatgatgttctactaaatatctgaagattaagatgaagaattgagttatgatcacatacctcaattattaaaagtagccctaatctaaaaaaaagaaaaaaagaaaaaaaaaaggaaaaggaaagtgatgtacagaaaaccaaagtgagggacagaaatagctgggctcgttagagctcaacgtttgctttagttgaacatggtttaaacagttggcccctgtgattgaccagaactgggctgccgtggacttggatacttgttggaaaggtaggttacagtttgtttacatatccagttaggttacagtttactatgcatggagaaacgtttatgccaagcctaaaatatgtaaagaggcagctttaggctaaacttaatttaacaattcttagtataataagagtgaggagtttgggtcttttggaggaaatgctgaagtatataataaaatttacttcataggagcatctactataaaaaccctttaaaaatatttctaacacaggaaatctttcatctccttgggtctctgaaaataaagaacttctggcaatgtagctgactgagttgatactgacagacccacttcctggtatgagtaagtataaattcttcaaagattttttaaaaaattcaatcgtagttgaacttgagaaaagtagagaaaaattctcatttgtcagaaactaagagggaactcaaatggcaaacactagctgatgtcctgtggcctgtgggaaggtttggcatccagttagatgccctcagaactggaggctggtggttaaaactcaggcaggtacaagaaatgggacctgaaactatcaccaggcaggatctaggaagtaagacccttatataaagtttatattcttaagaacgctgtttgggcagattgttctcatgatgccaagatccctttgatgtcaaaagagaagaatgtaaacttaaggtttacattctgaaagcatttttgtgcataagatggagacaagaaaaccttagtctgcctacaggaattttatgtggtaataaagtcatgaacaactaaaccatgcaatatcaccaagcttcttaattcacactgtatgcatagtggaggaacctcaaggtgagaaactgctgatactaaatagtgcatgtccttgaaataatcagaaacaaaagcaaaaggaatagcacacagaaagaacaccccaaaaagaaaaaaatataaaaataaaaaagcattaagcacaaggaaaaataaacctctaagaaaccacacacagattgcatgggatcccccacaggggtcaatttctgcataagataaatgcataggcaaatattacaaaatatgtaagaaaataatttatcatgagtagtatagtagacacaggaaaagggaatataacccctgggaattgagataactgaaaattctgaaggagactatatataaatgggtttaaaaggtaaacaaaaaatggaaatcggggggttgggggcaaggggagggagagcattaggacaaatacctaatgcatgtggggcttaaaacctagatgatgggcagggtgcagtggctcatgcctgtaatcccagcactttgggaggctgagatgggcagatcacgaggtcaggagatcgagatcatcctggcaaacatggtgaaaccccgtctgtaccaaaaatacaaaaattatctgggcatggctgtgtgcacctatagtcccagccacttgggaggctgaagcgggagaactgcttgaacccaggaagtggaggttgcggtgagctgagatcgggccactgcactccagcctggtgatagagcaagactctgtctcaaaaaaaaaaaaaaaaaaacacctaggcgatgggttgatgagtgcagcaaaccaccatggcacgtgtatacctatgtaacaaacctgcacgttctgcacatgtatctcagaacttaaagtatattaaataaaaatttaaaaatgaaaatcataatgaagaaatggaatatagaaaatgactgatttggaaaagaacaatgtagaattaccctttgttgggaccatccttcctatcactttccttttacttgaagcctttcttttgttttttgtttttgtttttatttttattttttgaaacagagtcttgctctgtcgcccagcctggagtgcagtagtgcaatctcagctcactgcaacctctgcctcctgggttcaagcaatccttccacctcagtctcctgagtagctgggattacaggcgcctgccaccatgcccagctaagttttgtatttttactagagatggggtttctccatgttggtcaggctggtctccaactcctgacctcaaagtgacccacccacctcggcctcccaaactgctgggattacagacgttagccacagctcctggcctagtctttttcttttggcaaagttttctgttaacctattctctcatttctgttttcctgaaaataacttaatttcattatcttttttgtttctctgggcatataattctctatcggcagtgtttcccttcacaagatgtctcttcatcgtcttctcacttccattatttcagttgagttttaggcttcctgttctttttgtaaaagtgtatgttgttttttcccctgttgcttttacttattttattattttattataaaattatatatatataatttaaggtgtacaatacaatgttttgatatacattgtaaaatgattactaaaggcaagataatcaacatattcattgcctcacatagttagttgcctttgtgtgtgtgtgtgtgtgcatgtgtgtgtgtgtgaaaacacttaacatctactctcttagcaagtttcaagcatacagtacagtattattaactgtagtcaccatgctgtacattaaatttttagaatttattcattctacataactggaaccttgtaccctttgacagatatcttctaatttccctcaccttcctgcccctaataaccaccattctactctctgcttttgtgagtttcactttttttaaggttccacatataagtgacatcatgcagtacttttccttccgtgtttgccttatttcacttaacatagtatcctccaggctcatccatcttgtcacaaatggcagaatttccttttttaaagctgaataatatttctttatatgtatgctttaacatatattaatattattatatatgatgtgtgtgtgtatgtgtgtgtgtgtgtgtatatatatgtgtgtatatatatatatatatatctccattcatcctttaatggacacatactgaatccatatcctggctattgagaataatgttgcagtaaacatgaggtgcagataactccaggatactgattttttaccttcagatatatacctagaagtggaattgctagattttatatggcagacctattgtaattttcaaagaaacttccatactgttttctataatggctgtatccatttcttgttacgtttatgattttctttttatctttggttttcaacaactttccttgatgtgcctacatgttgtttttctttttattcactctgcttgggttcagagatgttctagaatctgtgactggaggtctgtcatcaattgtctcaaattgccatccagtatctctttgtttataacttctccattctctcttctctctttctgggactccaatttacatgtatgttagacttttcactatgctccaagtgtgtcttatgctattttctccattttaaaacttttcttctctctgcattccaatgtgaatattttctacttccattttgctgttcctctctcctgtctaatcttctgttaagcttatttattgaattcttaatttcagtttttgagttttttggttctagaatttttactgaactttttaaaaatagattctacttctttaataaaatttacatttttaatctattatttcaaacatattaattgtaagtattctaaagtcagtgttagtacctgtatatagatcatccttggctctgtttctattttcttttttcttcttgattttgctcatttagtcatttttttctggcatacttggtaatttttttaattgaatgccagaaattcaggaattatatatgaaaaactagaggctggaggtgatcttgtctttcagctgaaggaatttaatttttttctgagaccatggtctctcaaatactgcctgcataagtcaactcccaatgctcataaacaactgttttcttagttttgtctaattgtcagagtcattcctactgagaggttgaatcttctatcagttactttgtcacaactggaagtggaattctgttttttaatttttttaattatactttatgttctagggtacatgtgcacaacgtgcaagcttgttacataggtatacatgtgccatgttggtttgctgcacccatcaactcatcatttacattaggtatttctcctaatactatctctcccccagccccccaccccccaacaggccctggtgtgtgatgttccccaccctgtgtgtgatgttccctgccctgtgtccaagtgttctcattgttcaattcctacctgtgagtgtcctttactttttcaagtgaccactctttccttcatcgggattttggaccttgcactctgctagttgttgtcttacttctctggtgattcctttccagtctcctgtggtttctgttgctttgttttcaacttacaagtgatggagtgtcccacagctcagggcatagatgtcttattctcagacacttattccctatgaccaggaagccacattcagtcccacggcattcaaagtcccatttcatatgctgagaccaactggaggttcatttaattttcacctactttctctgacccattaggagttgtgtgctgtaagtggtgtgaaggaataatgcccctacacagtctaaattattgttcgttcatgtagtagaacctatggaagttaaagattcatgattcaataccactacattatttactggacctttaactcctagaatatgtatttagtacagaactttctaaatgtttctcctgcttttactagcttgaattgacataaaatttattttcaccattttccccctaggatggagtttataggccatattctgggtttaactaagaaccaaactattccgttagttggtttcttctaagtccccatatttctctatgaaaattcatttttgtagaatttattgaccaagaccatgtgccccaagaccatgctattaaatacacaccacagaaaagtcattaaggtaggaaaaatactaaaatttgagtattttacattttctgcaattccccaacttctcagaagattgattttccctaaaggtaattattttgttgttaatggatggagatgaaattaaagcagctgagagtgtgataaattgaattacacgagagatggataaaccttaaagagtagcctctggttttacaagaatgggataaaagagataagggcagaacaagatgacaggatcgggggccatgggtggaggagggaaacggaaaaataaagcaaataagagaggagtgagattgtagggaaagatacactttcaaaaatatttaagaaaatttagctgtgggatataacccttctccatattcataaaaaaacttaacttaaaatctttatttttttcaatacttttggaaacatccatgtattgccttttttttaggtcattacatgttgcaattttcttgaaggtgagagcaagaataggattcgttcagttgtgttttgggtggaatttctcaggaactaaggacaatcattacaaagcaacacaaaaagaacattgtatttctatgcgacaaaagtggagttttattcagaagcagcaaaaataagatacagaaacattgctgtaaaaggaaatacagggtgaaacaatcagactttcaaatctgagagtgagacaaccttgccccgagttaccctgcaagaatttccatgtttgggacagaagaacttggtatccataaatacaaatataaggtataaaatttggtaaattctattaatttctttctgtaaataatatctaatttcacacttgggtcaacatggggaacatatattctagatgtatagccaggacatatatcctagatatatgtccaggatatggaaacacagttggtgggaatggcctcttctgagttgtttatgagatgcacaaggtctgcttctgtgaggagtgagctgaaggggaggagatagtttcaggcaaggagctcagcagcaagaggaggcacagcacaagggacgggggcaggtggaaatgacacaggttgggcgatagcaagtggtgtggcaggagactcggccacagactggacgcaggcagcagcaggggcggcagcagcacgggcggcagcagctggattcacagcaagaggggcggcagcagctggagatgcagcagctgggacggcagcaggttggctggcagcacacagactggcagcactgggacctgcagcacctggacacacagcagctggggcgacagcagctggagatgctgcagctgggacggcagcaagtgggctggcagcacacagactggcagcactggggtctgcagcagctggatacacagcagctagggcggcagcaggtggtcctgcagcaggtggtctgacagcagctgggacagcagctgggacggcagcaggtgggctggcagcacacagactggcagcactggggtctgcagcagctggacacacagcagctggggcggcagcaggtggtcctgcagcaggtggtctgacagcagctggggcggcagcaggtctccaggccacagccctggtcagagcagacggaaccacaacaggagctgaccatggtgtcagagggtaaaggttctgggtgggtttccaagagagtgagtttcgtgagtttgggagtctccttgctgcatgtccccttttatacccagctgaggagcctttgtgattatgagaagattgtttccttgtttttgtttatatgacacaaatgcaattactaaattatattgtgtttttctagtaaaaaatcccaatatatagaaaatgattatttcccttttctcaccctggtgttcccacatgagtcacctcttgttttcctttccttggtttcagtgtcacatgacttcagtctctgggtatcatgtgacatgggagggccactgtcacttgtctgtttctcatcatgatatcgttttgggagagcttctgattgggctaagatctctagtggagaaatgcatgtgtcaatcagctggaatgctgacaggaaaaaaagaaaatatgctcctgtttttgagtgtgagaaataaggaagcttatgattcattgtatgtattctgggtggccattgagctaactaaattcctaggtcattgcaagctgtgttaattctcatcactctggtgcaccttgaaacagttagtagtgactcactgtttctaaggaacaaagcatcatctgggcttgagctgcgtctgtcttcaaaagtgtcctacaggctgaagtagagtaatgtggatcatagtttttgatctgccttttgaaatatcaaatgtgtaatggttatgctttattgacattttgttaaaatctttttcatacattttgagctaaaacatctagcagggtttttttttagtatcacttatttctaagattttttaagaagcattgagaggaatataaaagatatattctttaacttacaggtacttatgtaactgtggacctcaattttaaaaatcacccactttctcttcctttcctcccctctcacctcttcattccttccctctgcacactcccttctggcaatactatctaatatcttatctaattatattcttgcttaagaaattccagaggctaatcttgaaacaaaccaggcacagagccctgaggaatcctctcacttagggggaatcttgaacaattaatccaccaccattgggctgaagtcaaaataatgcctcccaaacctctggacacccaagatagccattggaacaagacatgcagactcagcaccctgcaccacccctgcatgtctcccatgccaagtttccctttcaaaaccctatggcaaattttaaaatttaagatggcactttagaatgctagttcactagctaaaggatgtcagtgagatatatcttggggtgaaatgtttttatttccttcacttagcattcttctagttattcattaccagttagttcaaatgccatttttctccaatatctttcttggcctcacacaaagcaaggttatcctctggtttactggctctccaactagaactaactttcctttcaccagcccttgcctcttatgtgttggctttccagcagcaagcagctgaacctgggtccagttacatttacacagaaattgcattcataacaagtttttattttatttatttatgtatttattttttgagatggagtttcactcttattgcccaggctggagtgcagtggcaccatctcagctcactgcaacctctgctttccaggttcaagtaattcttccgcctcagcctcccaagtagctgggattacagccatgtgtcaccacgcccgtctaattttgtatttttagtagagatggggtttcaccatgttgtccaggctgatttcaaactcctgacctcaggtgatccacccaccttggcctcccaaagtgctgggattataggagagagccactgtgcccggcccataaagagtttttaaataaaatcctcacatgatcatggttctaaataaagggtcttctttagtgccgtggacattcagggaaaagcaattattcaaggaaagaacaaattaccttcacaatattttctcttcctgggaatgaagggatgtctcttgtgaacttatgtggggcctgaggaacctggagatctctgccctagtggagtttgtattctagaaggagctgatagacacatgaatttccaatggagaatgagatgatagagcccatgtgtaaataaggcaccacagaagtgcaatggaggaaggattttcctcactgaaaaatcactgacttgaggcggattgattagtaggagaaaaggcatacacatttatctaacaagtatacccaagagccttcagaatgaaaactcaacccctcaataaggtacagaagcttatacaacatcttgaggtcccagaaagaatgagggctcagagcatggccaaaaacaggaaacaggttttagtggcaaggcaggtgtattggtccattctcatgctactatgaagaaatacccaagactgggtaatttacaaaggaaagaggtttaattgactcacagttcaccatggctggggaagcctcaggaaacttacaatcatggcagaaggggaggcaaacacatccttcttcacatcgtgggagcaaggagaagtgcagaggagaaggaagataagccccttataaaacccttaaatctcatgagaactcactatcacatgaaggtaaccgaccccatgattaaattgcctccccctgtgtccttcccatgacacgtggggattatgagaactacaattcaagatgagatttgggtggggacacaaagcctaaccatatcaacaggttatgggagggagaaagaaagaggcttggccagcaaagggggtcttgttatgtggatgaaatctcacaggtagcaactctcagagaaaagagatggtaaatgatttttttcagaactctaagggtgtcagacagtcagttattctcttctagatccaggaaaggcctataatgagaaggcctgactgcattaatggagattctctacagatgcaaatttccttcacaaaagacagctttgcagggccactttagtctgctggtcatgtggcagccatcttaaaatatgtcaaaaaatatattttggggtaaaatattttttattttcttaatttagcattcttctatttgttttttactgtccaaatgccatttttctccaatatctttcttgttctcacacaaagcaaggtccttcctccactgcacatctgttgtgccttatatatgcacagcctctaccatctgattctctctcagaaattcatttgtctattggcaccttctaaaatacaaactccattagggcatagactatgatctattcatctttatataacagaacctgaaacatatgtttaatggatgaagattttgtcaaggctttcaagggtcacactgacctttgagaatacaaaccattcaaataggtggagagaaaggggatataaaaggagcacataattgagattgggcatgaccctggcttgtgatggtgaaagtgatatgctgaaaggtctgttttgagaagtaatgagagaagttgggattgatagcatgagggagaaattgtgggtaccctcaaatcctggaagaaatggtagggagctatgaaaagccttcaggaaggaatgttaggtgatattgtaaccgcccagtgggttcatttttcttgctgttataattttggcaaaagtgctttcaaaatatatgctatgcacaatgtattttaatttttgatctgcctttagaaatgacaaaacactcctggatttctgggaagagatgccattaaaaaattgaagtgaggctggacgtggtggctcacacctgtaatcccagcactttgggaggccgaggcaggtggatcacaaggtcaggagatcaagaccatcctgggtaacatggtgaaatcctgtctctattaaaaatacaaaaaaattagctgggcatggtggtgagcgcctgtagtcccagctacttgggaggttgaagcagaaaaatggcatgaacctgggaggcggagcttgtggtgagcagagatcatgccactgcaccccagcctgggcaacagagtgagactccatctcaaaaacaagagaaaagaaaagaaaagaaaaaagttgaagtaagacagtaaaatttgaactctcagcatcaggtgatggccgtgagcataacaaagataaattattctctttattatgaaataataaatttatttatgaaataactaaattctttctttgaaataatcagtagagacttggaacaaattgaaaatagaggtataagaagggttcttcctaaaagttataaaagatatttcaattgaactaattgtttacatattctataattttctatatatgtaatttataccccctacctacttaaagccaataattaaagtttttaaaggataaataaataagaaaggataagatgtgcctaaaaaagaagaacttaaaaagaataagccatttagagataaggaagaaatatttacattaaaagactagaatggaatcgttggcacaattatgcactaactacacttgttcttttcagaaacttaagcaaaataaaaacccaatgttttatggaattcctgtccctccctcccttccttccttccttccttccttccttccttccttccttccttccttcctttctttctttcctttctttctttccttccttccttccttccttcttttttctttctttctttctttttctttcttctctaaatattgtatactgagaattttgctggatgctggaataacaaaataacaaacgacatgttttgcaattgttctactgttttacatatattcgctcaattactagtcccaacaatccagtatggtaaattctattataatcctcccttcacagatgagaaacttaaggcacaggtgggattcaagccagtaagcaggggaaatgtaattttatttcagccagcccagcactgggtccatgtttttaatcactatacacacaacctctctgcaaaatcagatatgaaaggaattttctctatcctcatgttgcttttgatgcagtaaaatttatgaatttttttctttgacagctcctgggtatgtgtcatattttaaaaggcctttccagttataaatttacataagcattatcccataatttctgttaacttcaaggtttcatgttttatattttaaaatattttacctactaggaatttatacagataaaaatatgaggtttaaatgttttataatcagatgtgaccaaggctcaacatcatttattaaataatacatctttccattactgagttaaagtgccaccttttcatataataaattcttttgtgtacgttagtctatttctggacttgattttcaattcactaatgatttttcatgtgctagtatcacagtcatcaatgtatggtattaacatgcttctaatggttatcaagttcaagtctgccttgataggttatggcaatatgctagtgaactcatatatctgtgttgcaaaattgtatatgtatactgcgttccttgccatgaaaatgtgaattgcacctgtctgggctctgaaactggcatcgaaaagaatacactagctgagtctgcagtggcgtatgagtcttactaggtttgttgagtttcctgtaaaattctgacttaggtggtgcagctgaaacaattggtggaaccaacttgtttaatcaccaagcttgttgattaacctcttccttactcactggccagatgggactgttataagggagttcatgggaattaaaactcttatttcagttacttctttaatcaaaacaggcatctattgttgcctttctggagttctatcttgcttagttttactagctagaaaggcttgagcaattccaaagctatatatttagcatgggcaaatagtactgagagactttgaagtgaatgaaacatcaactaagtcaatgtttcattcacttaaaatccatctctactgtgcatttagataaagctgatgtgaccacagaataataactgcagtcacactttcccattcataaatttatgtctaccttgggtttcaccacaatgtcttccatatcatctttggacccttcagagcaccataactctctccaaagccaatgactgtacttgagtgtctgtgcatacttattctaagaagtttcgcatgccacccttgggacatttcacccaaattattgcataggccttcagacccggggtacctgctccttgttattgtgagccctgggtactgagctttcccttgttgctttccctgaactctagctacacctttgcaaatagtctctttattacgcagatacactgtgtcatctcattcctgctgtggcccagttcttgtggacacaggaaattacaagcctcatatactttaatactgaaaagaccatataaaacctatagtctttgatttcactctagctaataaagcataatgttaaaaccaaagcctgcatcctgtaatgagcagttgtcaaagaaaaacatatgagaggataaaaggtttgttaattctgatgtatgaaatgacaagtctgtactctgtagaataatttagagtgaatggaaaaggctgaagctgaaagtgtctgcaaggcatttttatgatatgctaagaccataacgcctaacttaggctggagtgaagcccacgtaatgttaacttctattcatgcagtcgcttgacaacttaaaacttctttatttttacatttcagaaataataattagctcttagttacatttctttggaaatataacacagctaataaataaaattctgatttatagaaattttggatttaaagcagttttaatatactttggattattagctgaaatataaacccttatatttatataaataagatattttgcacatattgtgacacattttttcatctacatagaataacacttgtttgagttttgatgatgagaaaactgagtctcaaggaaaagtcccacccatgttctcttaagacaaagcaaggtgattaaagcccaaaacaaaggagtaaaactatcaagaaaatgaaaaaacctcagtaacattaggggctaaaattataaaggagtttcagtctggaaatactaagactttgagcatctattaattaaaagatgtaaaacttttatgagaaaactgccacagatgtcataaatttcccgaaatcttgacttagaaggtagactgtgttctgaaagatcattttatgttaagagaggaaaaaaggaaggaaggaaggaaggagtgagggaggaaggaaggaaggaaggaaggaaggaaggaaggaaggaaggaaagaaggaaggaaggaaggaaggcaggtaggcaggcaaggggaggggaggtggagggaaggtaaagggattagaaggggagggagggggaagtaaggaaacaagaaaaaagtacttgagctagggaaaacactcaaaatttccacaacaaataatggaacatactggaagtagaaatacagtcagacaaaatgtagatgacttcatgatgttcaacttgctggagtttttaagggacacttgaggcatataccaaaacttaattttgagttgtagaagacagcgcaacaatgatacaaattttcttgctgttctgtcaaaaagaaaattatgctaagatattattctagcccagggtattgtttcaatcatagtaacagcagaaattgtatttatttatttatttatttatttatttatttatttatttattgagacagagttgctctgtcacccaggctggagtgcagtgacatgatctcggctcactgcaacctcctcctcctgggttcaagtgattcacctgcttcagcctcccaagtagctgggactacaggtgtgcaccaacacgcccaactaatttttgtactttcagtagagaagggatttcactatgttgcccacactggtctcgaattcctggcctcaagtgttccacccactcagcctcccaaagtgctgggattgcaaatgtgagccaccacgctcggccagaaactgtatccattaagagcctatactgcattatgtaccaggccctgtggtgagtatattacatgggttatgtctcttaacatttaaagaatgtaatgcattatctctattcacagagaaagaaaactgaggcctgaggaggttaaaaaacttgccccatgccacgcaacaaatacctaggggagtcgtgattccaatgcagggaacatgaatcaagagcccaggctcttaaacatgctctcctgcatttgaagagagatggcccttgatgtgaactgacaggtaaagacacacacacacacacacacacacgcacaatgagatcactaacaaatcagaagatttcaatattagggaagtggctgtttattaatacatgaaaacaatattatatgagatcatcacagttagtgtccccttcgaatgaagacactgctcatctaaaaataactgcattggggcctggcataacatattttaatgaatgtgattgtctgtcatttcctagaagagctgaatgtccactctgaatgccacatgagacaaactggcagggaagtgttcatttttccagtgactggctggctacagtgcattttaaatgactaatgaagacattcatagtatgacaaatatcacaaggagacattagcagcaagaggaggcacagcacaaggggcgggggcaggtggagatgacacaggttgggcgatagcaagtggtgtggcaggagactcggccacagactggacgcacgcagcagcaggggcggcagcagctggattcacagcaagaggggtggcagcagctggagatgcagcagctgggacggcagcaagtgggctggcagcacacagactggcagcactggggtctgcagcagctggacacacagcagctggggcagcagcaggtggtcctgcagcaggtggtcctgcagcaggtggtctggcagcagcaggggcggcagcagctggattcacagcaataggggcggcagcagctggagatgcagcagctagggtggcagcaggtgggctggtagcacacagactggcagcactggggcttgcagcagctggggcggcagcaggtggtcctgcagcaggtggtctggcagcagctggggcggcagcagttctccaggccacagctctgctcagagctgacagagccacaacaggagctgaccatggtgtcagagggtggaggttctgggtggatttctagaagaatgaggttctcaagtttggaagtgtccttgggccacagcctcttatatactgcccagctgtcttgttggtactacattttccttgtttttgtttacttaataactaagtgattatcagattacacaataatgtttgcccatttaatggtttaaacttgttgaaaacaaaattttcttgtccggatgtaataagatctatcatgtctgccttctctcatgattcacacctcggtagcatcttctagaccacgttctcttcctcttcctccacagagggctgttcatgtgattccctgcatttggaattgcatttcttactctcgcttcaggtaccctctaccaaaatgggatttggtcagtcacacttccagttatgcattccctctagtgaccaatagcgaggaaaacccatctgctcagtgtggcattcctagtctgtgggtcattattaagcaataagcaaagggatagcaatacctgcatgtggccttggtgacctctacactattgaaatgggtttccctgaatgtttcaaattttgggtcatattccatatccttaaatttttatacttggtgttactaatgggtcagtttcttaaattgatactttgctctcctatattttgtgtcatgtctctccagttaatctattagattccggaagacatagtcccatttttattccataactcattgttttttttaaatgcctctaactgtctgttaacataatgcaggtgtgtgttttcactttttaaaaaagaaatttgagataattgtagatttacatacagctgtaacaaacagtcccaggagaggctgtctgtacttcacccaggctccctaacactgtgtaacacctgtataatacttttaagaatctatctacccccactactgtgtcttgcatgatgtgcttaatatagaaagaactcaagctcagtgaaattaaaaacaattagttatttttcagattgacgtataatattgtatttaccacatacaacataatattttgaagtatatatacattgtggaaggattaaatctagctaataaatgcattacctctcatacctatcatttttttgtggtgagaacgcttaatatccattcttagaatttttcaagaatacagtatgtacaatatatcatcattaactatagtcactatgctatacagtagacctcttgaactgattcttcctgtctagctacaattatatgtcttttgaccagtatctcctcaagcccctgactccctagccacccctagcctctgattatcttcattctctgctctacttctatgatatcaacttttttgagtgcgatcatgtgagtgagatcatgtgctatctgtctttctatgactgatttacttcacttagcataatttccttgagatgtatccatgttgtcacaaatgacagaacttccgtctttttacggccaaatagtattgcactgagtatatactgcattttctttatccccttactcattggtggacacttgcactgtgtgcatatcttggcaattgtgaatagtgctgcaataaatctggacatgcagttatttcttcaacatactaagttcatttcctgtagatatataaggtacccagaagtggattgctggataatacggtaattccagttttaattttttgaggaacccttatattgttttccataatggctgaactaatttatattcccaccaacagtgtacgagggagtttttttcacatccttgccaatacttgtcatcttttgtctttttgatgataaccattctaacaggaataaggtgatatctcaatgtggtttcgatttgtatttccctaatgattagtaatgttgagtactttttcacaaacctgttagccatttgtatgtcttcttttgagaaatgtctagtcaggtcttttgcccatttttaatcaggtttttgttttcttgcttgtgagctgtttgagctccttttgtattttggatgttaaccccttatgagatatatactttataaatattttctcccattctgtaggttatctcttgactctttttgtggtttcctttgctgtgtggaagctttttagtttgatgtaatctcagtcatccaatttttctttcgtcgcctgtgcttttgaggtcatattcaaaaagtcattgccgagaccaatgtcatgaatctttcccccatgctttcttccaaaaatttcatagcctctgatcttacattcaagccattaacccatttgaactgatttttgcatactgtaagaaataagggactaatttcattcttctgcatgtggatacccagttttcctaacataatttattgaagaaactgtccttcccccattcttggcatctttgttgaaaatcaattggttataaatgagtgactttatttctggtctctctattccattccattggtctgtgtgtctgtttttatgtcagaatgatggtattttggttactgcagtgttgtggtttattttgaagtcagggagtgtggtgcttctagctatattcttagtgtccaagatcactttggttttttgtggttctatacaaattttagaactttttaaaaatatttctgtgaagaatgtcattggtatatttatagggattgtgtgagatctgtagattgctttaataatatttggacaatattggaataaacacaggatatcattccatttatttgtgttttcatcaatttctttcatctgtgttttacagttttcagtgtagatatcctcacttccttggttaaacttgttcctaagtattttattttattgtaactattgtaaatgaaatagttttcttgatttctttttcagatggtttgctattagtgtatagaaaacctactgggttttgcatgttgattttatactctgcaaccttactgaatttgtttattagttctcacagtttctcagtgaagtctttagggttttctacatataagatcatgtcatctgcaaatagaaacaatgtaacttcttcctttccaattcagatatttttaaaatattttattcgtgtaaatgtataattttgttacatggatatattgcataatggtcgagtcaggacatttagagtatccatcactgaaataacgtgcattctacccatcaagtaatttctcatcatccttccccctcctacacccctgcccttcagactctccattgtctgtcattccacactctacctccatgtgtacgcatcatttggccccactgtaactgagaacatgcagtatttgtctttctatgtctgagttgtttcacttaagataatggcctccggttccatccatgtttctgcaaaagacatggtttcattatgttttatggctgaagagtattccattgtttatatatagcacattttctttatccagtcatccactgatggacatttaggttgattccatatgtttgctactataaatagtggtgcaataaacatatgtgtgcaggtatatttttggtataatgatttcttttccttcaggtagacactcagtcatgggattgctggatcaaatggtagttctagttttagttctttgagaaatctccatactgttttccatagcggttgtactaatttacattctcaacaactgtttatgtgttccctttcagctccatcttcatcaacatttgttatttctgtctttttgatagcagccattcttactggtataagatgatctctcatggtggttttaatttgcatttgtttaatgattagtgatgataagcattatttcaaatgcttattggccatttgtatgtcatcttttgaaaaatgtctgttcatgtccttttcccctttttaatggaattatttgcaatgtttttgttggtagagttcctcttaaattctggatattaatcccctgttggatggatagtttgcagatattttctcccattctgcaggttgcctgttcactccattgattatgtcttttgctgtgcatgacagaccaggagcaccatcatcttggacaaacactgccacttgaagttgcagctccctttctagcctcatgcatttcaaggaaatcacttctcttctaactacaagcagccagaaacagcagacagtaaaacacagataagatagctctggcacagagggaagcagggggaaagtctcttgggtaactgccaaacttcaccctcgtacaatgggccccagtaaaagagtgggccttaataagcactttcctttcccttcatgtgcactaagatagggaagttaaaagcagactcgggctatgcctgcaagggaatagacacacaactctccctcccagataagcacaacaaagagacacagaagcagtccaagcctctaaaaaactctcccaccctgaatccttaaaaactcttagtctgtaaaaagtgtgcctccaacctaactcagccaaatgccactcttaggtttgttttctctaaaataaacctgtcttaactggcaagccatctttcatgtttctttcctttttgtttaattcttacagtgcagaaactttttagtttagataaatcttatttgcctattttctgttttgttgcctgtgctttagagggcatagtcatgagtttttggctagaccaatgtccagaagagttttccctaggctttcttctggtttctttctttctttcgttcgttcgttctttcttttttttagacggagtctcgctctgtcacccaggctggagtgcaatggcttgatctcggctcactgcaacctctgcctcccaggttcaagcgattctcctgccttagcctctggagtagctgggattacaagcacccatgaccatgcctggctaatttttgtatttttagtagagtcagggtttcaccatgttggtcaggatggtcttgaactcctgacctcaagcaatccacccgcctcagcctcccaaagtgctgggattacaggcatgagccaccgctcccggcctcttctattatttttatagcttcatgtcttacatttaagcctttaatgcatcttgagttgatttttgtacatagcgagagatagggatctggtttcattcttttgcaaaggcaatccaatgtacccagcatcatttatttattgaataggatttcctttcccgtgtatgttcttatcaactttgtcaaaaatcagtttgctgtaagtatgtggctacacttctgggttctctattctgttccactgatctatgtgtctatttttaaccccaaaccatgttgttttggttactatagccttttaatataatttgagaatggataacgtaatgcctccagcttccccacccccctttcggattgctttagctacttgggctctttttcacttccttatcaattttaggatttttttccctaattccattaaaaatgacattagtatttcagtaggaattgcactgagtctgtagactgctttgggcagtatggtcattttaacagcattaattcttctgatccgtgagaatgagatgtttcccatttgtttgtgttatctacaatttcttttgtcagtgttttgtagttttccttgcaggtatctttcacctcattcgataaatatattcttaagtatttttataactattgtaaatgagattgcattcttgatttggtattcagctggatcattattggtgtatgcaaatgctactgatttttgcttgttgatttcatattctgaaactttactgaatttgcttatcaaatccaagagttttttggtggagcctttagggttttctagatataagatcatgtcatcttttgctgtgtgaagctttttagtttaaataagtcctgtctgccaatttttgcttttgttgcctgtgcttttgagatcttagtcatgaattctttggctagatcaaggtctagaagagtatttcctaggttttcttctggtatttttatagtttcatattttacatgtaagtctttgatttatcttgagttgatttttgtacatggtgagagaaatggatccaatttcattcagcaaacagaaataatttgcctttctgttttcaaatttgagtactgtttatctctttctcttgcttgattgctctggctagggcttccagtactatgttgaataggagtggtacaagttgtcatcctagtcttgttccagttcttagggagaatgctttcagtttttccctattcagtgtgatgtcagctatgggtttgtcatatgtgaccttgactatgttgaggtacattccctctatacctaatttgctgtgagttttttcataaaaatattctgaatttttaaaaatgcttttttttgcatctacttaagtgatcatatgcttttcatccttcattctattaatgtgacgtatcatgtttattgatttatgtgtgttggcctaaccttgcatcccctgagtgaatctcacttgatcacggtgaatgatctttttaatatgttgttgaataaggtttcctggtatcctgttgagtattttgtatttttgcacctatgtttataaagtatattggcctataattttcttttcttgtagtgtccttatctggctttggtaaagagtaatgctgtcattataaacagatgttggaaatgttccctcctcttcactttttgtggaagagtttgataaggattggcattaatccttcttcagatgcttgttagaattcacatgtgaagctatctggtattgggctattctttgctgggaggtttgttattgctactttaatcttcttattcattattggactcctcagattttctattcttcatgtttcagtctcggtaggtattatgtttctaggaattcatccattccttctaagttatccatacatttacacacaaacatacacagacatacacatacacatacacatactcataagtgcatgtaaaactgataaaactagaacaagttttgtggattttaccaatgtcagtttgtggggtttgacatgtactctagtgatggaatacgtgacgactggggaaaactgggtgaagggtgcataggactttgctgtacttttttttctactttctgtgaatttatagttatttctaaataaaaagttaaaaatatatatatgaggattattgggaaaaaaaggggagcatgcttttacttgccaatctcattgaatatttacgacatccttactatattttgtggctattgtgatcatttccttaaagaaaagcaaccctaggctgagatagttaacatgtacaagaacatacctggtatgtagtacagtcagaattcagccccaactctctctaattcccaagtgcacagtctatactgtatatagagcttccttatcagtttaaatccctccctttaaataagtttaaatcacttcatgggatgcagtttattgacgactttctatttcggtggctgttgcaattcatagctcttatgttagatgtattaggttcaaatatgcctcctttgatacattttcctatttctgctgtgagacagaatcctagttttgattaaaaatctcattagagaatatcaatttaatttttcaattgtatgatcccctgataacatgtactctcgggttgtgcagaaaaagagacagaaatatgcataggccaatttattaataataaacagtgaaagagaaccatacacacagattgtctcaagtctacctaaatgatacctcttttattacacagaacagctgtattttttcttttatacacttttttctctttaaactcattgttttgttgtcattttagaagttcatttttttttatgtttacctaattgatacctcatctggaggattggaccatctatgaatcttcttcctctcccacaggttgacccatagctagtggtaactgatgtctgagtgcaaaattccaaccaccttgcctctcagaaagatgggtctgtgatactaatcacactctagagcttcctatggggtcagaagagaaaataattcaataaaaatcatgttctgccttaggtttttaaactcctctattctgcttcccagtttcttactgatttctcctgagagcattttcttataaatcacttatccaagaatccttgttttcggttctattttgagtgaatccaacttagcacacctcttaaacacagtttcttttagaataaaagttactagcatggcaattctgccttatccttcagatataataatgtggaagaaaaagagattgaagactgggtgtgatggctcatgcctgtaatcccagcacttttggaggctgaggcagatggatcacttgaggtcaggagttcgaggccagcctggccaacatggtgaaaccccgtgtctactaaaaatacaaaaattagctggacgtgatggcacatacctgtaattccagctacttgaggggctgaggtgggaaaatcacttgaacctgggaggtggaggttgcagtgagctgagatggcaccactggcctccagcctgggtgacatagcaagactctatctcaaaaaaaaaaaaaaaaaaaaagagagagagagagataaagacaactagtccagagataactgtgccaaaactgagaagaagaaaaagaagaagaggaagaagaagaagaagaagaagaagaagaagaagaagaagaagaagaagaagaagaagaagaagaagaagaagaagaggaggaggaggaggaggaggaggaggaagaggaggaggaggaagaaggataagaaaaatatttatttagaacatttacctatttactagacagtatactcaagagttgaccgtgacaccagggtaaccactgatattgtataaaaatgatttaattatgttacgtgaaataggccaagcacagaaagacaaattgctaatggaatggaactcatgaagataaagaatagattgctggttatcagagtcagaggagggtgcctgtgggaaatgaagaggtggattgacgtgtacaaatataagttagagataaaaatatgacctagtattcaatataactgtaggatgactatagttaacaatgatctattaaacattccaaagtagctacaaaagaataattcagatgttcctagcataaagaaaagataaactgtgatggataatccaattaccctgattggatctttacaaattatatggatgtatcaaaattttatatgcgcatctgctacatatcaataaaaaaggaaaaatgttttgaagggcactaatactgaggttaggaacactggtgtcttagattgggtccccactggagccgacccaggagtatatttgggaggtggtcccaagaagtgctgtatggaacacgaaaaatgctccaggaaagggagggaagtgaatacaagatgagttaatgatcagaatagccctgtaggtagctggaatttggtgtctctgaggaccactgacatgctggtacaacatgctcccaactggaggagaaataactaaagcatgtgttcaccaactctcactcatttgttgaatactattccaagaggctttaactctacagtccagagcttgctccttggctagagaaactcttcaagaagagagttccaggtgcttgctctaagaaaccaccattgtatattagaataaagtgtgctgaggaaatagaggtggtgcccctgaaattacattctgcagagaagaacaacagaaaaattgactggtaattgaccacactcaaaaaagaaaaataatgagacacagtatctgtatatttctatgcctgaaaatttatttaagatttatttagataaatatttgtttaaaatggaatagctccatatgagaaattatggcagagagcaaatatttcaattaagatagttgacagatttcagagcaaattacaacttatgttcatttggtagagaggtaaaatgtggggggagcatatatttggaggccagattcaatctaagaattggttggaactgaagttttccaactagcttcccataactcagctcatagatgagctacatcaagaatgctggttgatgagaatctggtgagtccagatgacagcctcagcagcaagaagcactagagcaggttgggcggcagcacatggtctggcagcagttggggcggcagcaactggagatgcagcaggagagcctgcagcagctgaagccacagcaggaggagctactgctgctagagatactgcaggaaggctggcagcagctggaaatgcaatagctggggtggcagcaggtggtcctgtagcaggtggtttgccagcagatgggctagcagcatagagactggccacaatggggcctgtagcacctggacacacagcagctggggcggcagcaggtggttctgcagcaggtggtctggcagcactggggtctgcagcagctggacacacagtagctggggcagcagcaggtgggctggcagcacacagactggcagcactggggcctgcagcagctggggcggcagcaggtggtcctacagcaggtagtctggcagcattggggtctgcagcaggtgggctggcagcacacagactggcagcactggggtctgcagcagctggacacacagcagctggggtggcagcaggtggtcctgcagcaggtggtctggcagcactggggtctgcagcagctggacacacagcagctggggcggcagcaggtggtcctgcagcaggtggtctggcagtagctgggacggcagcagttctctaggccacagccctggtcagagcacacagagccacaacaggagttgaccatggtgtcagagggtggaggttctgggtgggtttccaggaaggagggtttggaaggcttggaagtctccttgccccagatcctcttttataccctgctcagggctgatgtcatcggatgcagcactctttccttgtcattgtttgttctgatgagcaggcaattatcaaattaggcaagtttgtttttctgcttaaatttgtcaacatggagaaaagcattatttccttcccctggtgtgttaggattcttcaggtcagctcttcttgaacaacctcttgtgtgcctcttgctgcagcttcctccttgagctgccatgtgacatctgcctgcaggtaccatgtgctgcagcctcattttccttaatacattatgtctgaccttgggtgattttaattcttctaggcccgtaattttcttttggtgactcaggaggagaaagctgtgctttaatctcatggcatgtttgttatagatcaagtgagcaatgaaggtttgaatgtgaaacaggtgaccagtggcatgaaaacaaatactattaggatatattccttgccaccttccatacaatgaatcatgacccattttctagatgttctactggggaaagcagaattgttttaaggtggacatctaagtcatgaattatcgatgcttctttttcttgagaaacaacactccaaaactcagtttcagggcctttaggggaaattggctacagagatcagctatactaaaaggttcaggtccctccgctctctgctctgaggggctgattttccttctgacttttccttcctgtctctctggctttaacaatcacattgagtcatctcctctatttctaaggtttacttgccaacctaaggtaaaggacccagtgtccttgctatatatatataatatatatatatatatataatatatattatatatatacatatatatactatatatagtatacacacacacgtatatacacactatatataaatatacacactatatataaatatgcacactatatataaatatacacacatacacacacatatatgtgtgtgtatgtatgtgtgtgtatgtgtgcgtgtgtgtgtgtatatatatatatatatatatatatacacacacacacgcacacatacacacacattatgtctgaccttgggtgattttaattcttctaggcccataattttcttttgatgtatatgtatatatatatatacactcacacacacacaggtttgggggaatatatatattctgccaaaggaccttaggaatatatatatatattatacatatatagatgggtagatagagaaccttatatataggtaatataggaatatatatatttacatatttatgaatatataatatatattcttcatatatgtttgtatttaatagtatgtataaatatatatataatatatacaataacatatttagaaatatatatatttatatatatatgtatttacctttatctcctaaggccctttaccttaggaatattatgcacacacacacacacacacactcaaacacacacacacacacactcccccaaacctggatgttaaagaaacccaaggaagaaggcagaaacttcctgtctttgtgccaccctccactttgggatgctcttgggttagcaatttctgtttggactggtctctctgaggatactatggacaccccaactctgctgagggtctttccataaaacatgctcatctaaatatttgggggccatgaaggtaagaaaaagtgaatatgccaaatggcagaaccatgtttccaaaactacagaaatactctcacaaggaatcaaacctaacaagatgaaatatcagaaccaattgtagatcaaatgagtggttattaatgcagcatggcaaacgagattggggaggagtgaatatatctaaatttactgggagtatttatttaactatacacacaccctaaggttgtgtcccctcttagcatcccttcaccagatagaatattacaagttgaggacatcttatctgaaaatctgaaatctgaaattctccaaaacccaaacctttttgagtacctatatgatgctcaaagaaaatgcccaatagaacatttaggatttcatgtttttgcattagggatgctcaacaagtataatgcgaatattccaactctgaaaaaacttgacatttgaaacacttctggtgccaagcatttcagatatggggtactcaacctggatcaccacaatgagctctattactgcaggcatgcagtagaaaggcaggttgagaacttctcgtctagaaacaaccactgtatgtgtataagaagaccttgaagcagtttatgatgaggattacttaggtgtgtcacactttagtaacctcagtattagttcacacttactgccaaccacttactgccactaacactgtgttaactcctgcatgcaaacttgaaacattcatgaaagtggaacatttactaaggtagatgaggcatttctaatcctccaagagtgttcagaacacatctggaaaatgcatttcaatccaggctagaaggataaagataaattggggtttatgaaaagcaaagttgctgtgagggtggcattatgatcaatgaggaacaaatggaaacactttggaaatgtaacctaaaaaggagaaaagtggaacaaagcaatggcagtgcagcctgaaggggctctgtatgagaatggacttcctcagatggctgccatgggctgatataggatagggaagataggatgttcctagggagaaacaaaatctgacacaacatgaggaaggtgctttatgaaatggctgcctctagagataatcaggggagggggtttcagtgtgagctggtgtttctgactgaggcacatgcaagagccagatggagggaattggatgaaattactttgagcttccctctctgcactcaggtccatgtaagtctaataagtggaatataatgttatactgttaaccagtttctactgctgccctggtcctgatttccaggcttacacaaccaggatgataacaatctggctcctgagtgggcccctgcttcagcactggctggtgttctgagtctgcactggctctgatgcacccagacacagcatcgtattgaggtcctgagcctttgtcctcagtcagaatgaacagaagcaggttccaagctgttacggggttaaaaccctggtgagcccgtttatggtgtatgagaacaactctaagatttcctcgagaacttgaattatgggaaaagaatcacatccttgaagaaccctgatgactggtacctaccgatgactcagtggagatcacttttatttacatgaattgactattttttttctttgtaaggtgagcgtgtgtgttttgcttaatgtaaatttgcattatgtttagaaatctctcacgatttcttctagtacttcagcactttcatttttccccagctttattgaggtagagttggcaaataaaattttatgtatatcaagggtacaacatgatgccttgatatgtatatattgtgagatgattatcacaaccaagttagttaatacctatcacctcacgtagttattgtttcctgtgtgtgtaatgagaacaattaagatctactttttcagaaaatttcaagtactcaatacagtattattaactataatcaccatgctagttactagatccctagaatttagtaccaatgtcagattttgggatttgacatgtactatgatcctatgagaagcaaccactgagggaaactgagtgaagggtacagggaactttgtcttattcaacttcatgttaatctatagttatttcaaaatctatcgttatttacaaaagtaaaaaaaaaagaggctaattggtagtaaaagacagcatgctttttttttggatattttcatatatttattcttatttttcatgtgtctatgtttaactacatgggatttttttttcgatgtgtggatatgtatataggaaaattcagagattattctttttaagattgggtaattggccagtttgtgagcatttacagtgttttaaataacttttatctttcaattagaaacacacatcaggcatatcatacactctgtcatcatttttccaatagttatacatgtactttattttccttatcttattgagtagttcataagacttttgtttaaaatactttctgtaaaactcggagacaataaggtggggctctgcatttatgttcttgttgagttcttagtagtccgaatcttatgcaattcaccaactatatttctacaagcaatgtaaattgggaaaaaaatcgggtactgaaatatttatttttataaatgagctaaacttaaaaatgatccaaagggtaagttcacagcaagcattcatttcttttccctccatgtaatttgcatgcaagtcaggcattttcacatatttttataaatctttttcttgatttgttctccttcttacaataattttaatacacaattatttttactctagttaatgggattttttaagtgccctgaattccatttcagaactatgaagggaattaaatatttatgttacatggataatagtattcaatattcatcaaagcatgcaaaataagcaattaagaatatgcaactgtatcccattatgaacatatccttgatacgccttccaaacttaaattccaaattctttctgctattcagctagaagtttttgctaatattttcttcatggaaaattgtattttctgcattgattaataattaataacaaaaaaatttccattttttgaaatagcctatttcttattaattttttaatcattcaattaccccccagcttatacaaagaattatatagtaattattttttaacagttaacaagtcacagtaggtttgggttataacgaacatactgtggcttacaagataatatggaatagtggctaacccatgaatatagtgagaaaactttttaaaagttatattggagtaatcccttagctaataattattattgtagtttagctatttggctatgacaaactaatactagttgcacctcacttgaaaatatatgatagcaacttagtacatggtattgtacatatcttcacttggttaaacaacttttagaggatatgcttagtgatttatatttcaactctaaattgttagttttctttttttttattatactttaagttttagggtacatgtgcacattgtgcaggttagttacatatgtatacatgtgccatgctggtgcgctgcacccactaactcgtcatctagcgttaggtatatctcccaatgctatccctcccccctccccccaccccacaacagtccccaggtgtgatattcccctacctgtgtccatgtgatctcattgttcaattcccacctatgagtgagaacatgcagtgtttggttttttgttcttgcgatagtttactgagaatgatgatttccaatttcatccatgtccctacaaaggacatgaactcatcattttttatggccgcatagtattccatggtgtatatgtgccacattttcttaatccagtctatcattgttggacatttgggttggttccaagtctttgctattgtgaatagtgccacaataaacatgagtgtgcatgtgtctttatagcaacatgatttatactcctttgggtatatacccagtaatgggatggctgggtcaaatggtatttccagttctagatccctgaggaatcgccacactgacttccacaatggttgaactagtttacagtcccaccaacagtgtaaaagtgttcctatttctccacatcctctccagcacctgttgtttcctgactttttaatgattgccattctaactggtgtgagatggcatctcattgtggttttgatttgcatttctctgatggccagtgatgatgagagagcatgcttttatttgtcaaccaggcacctttatctcattgacattttatgattaccttcatgtgtttttgagttattatgatcccttcttaagagaaaagtaatcctaggttgacagagtttaaatgccatgtctaagatcataggtggcatgcagtacagtcagaattcagcctcaactctgtataattctcaagtccacagaatatactctacattgagctgcttctgtttaaattagtttaaatcacatcatgggatgcagcttattgaagacagtttttttgtgctggcagttatattccacagctttcatgttatatgtgttaggttcaaaaatgtctcttaaattcttctcctgtttctactatgagactgaattctggcttggataaaatctaattggagaatgccaatttaatgttttaattattagggtgtttgacaacatgtactcttcttgtgttgtgcagaaaatagacagaaatatacatataccattatattataacaaatgaaaagagatgagcatttttggtgcttttgaacactatgaagttttattgaggaacatcaaacaattccacatgaaaattgataccacagaaaacattaggaagaaacatctagaaggataccatttgaagatttatgtatattgaattagaataaagaattctaaaacatgtgatgtggaatttgactgtaaattcagattcaataggaataaaaacttctataaaagagaatacatactaataaaatattttccaaatcagtccatgcctctgttttcacgacatcaggaagtccacatgttctctgaatagatactctgtgcctgaactgaaggttgagagcaagaaggtgcacaaatccagagcagcttcactcagcagcaagaactgccgcagcagatggggtggaagcaggttgttctacagcaggtggtcgggcagctgaaagggcagcggcagctggacacacagcagctgggatgacagcaactagaaatgcagcaagccgggcggcagcaggagggctggcagcactggggcctgtagcagctggagatacagcagctggggcggcagcaggtggtctggcagcagctgggtttgcaacagctagagatacagcaggaaggcctgcagcaactagaaatgcagcagctggggcggcagcaggtggtcctgcagcagctgggtttgcagcagctggagatacagcaggaaggcctgcagcaactggaaatgcagcagctggggcggcagcaggtggtcctgcagcagctgggtttgcagcagctggagatacagcaggaaggcctgcagcaactggaaatgcagcagctggggcggcagcaggtggtcctgcagcaggtggtctggcagcagctggggcggcagcagctctcctggccgagaccttgaccacagctctggtcagagcagacagagccacagcaggagctgaccatggcgtcagagggtggaggttctgggtgggttcccaggagaatgaggttctggagtttagaagtctccttgagcctcttatatactgccccagtttcctgttgtcactatatttttcttgtttttgtttatttaattgctaaataattatcagattacacaataatgtttgtccatttaatggcttaaaatcattgggaagaaaatattcttgtccagatgtaataagatctataccatctacttttccttgattctcaccttgatggcatcttctagaccaaattatcttcctcttcctctacacagggctatcaggtgatactctgcatttgaaattacatttctcactctcttttcctgtacccagtaccagaatgagatttagtcagttacattaccaattattcatttattccattgaccaagggagaggaaagcccttctactcagtgtggcctctggcctgggacaagaagaaaatgtcctattttgagtgtcatttttgagcaatgaggaaaggtttaatggccacacacagacacctcctgctttattctgttcattcaagctttacagaagcacctggctcaaggtcctgccttgcttataaaacagaggcattaaatggataatctgagagacccaagttgccagccattgggattacaaatttgatgtagattctccttcaggggagttcacagcttgctagaaggaacacacacacacatacacacacacacacacagtattatactgtgataaagtaacatcaaaggagctcattatagtttaattaaaagaatcatacttaaaacaaattagcaaacatgacaatttggtggattaattcataaataaatattttaatttagtttgtgtctatttttatgatattgtaaaatttacatacactgaaatgaacaaatcccaaatgtactatttgatgagtttttataaatgggtacatccatgtaacctccacacctattaagatagagaatgatgtaatttggctgtgtccccacccaaatctcatcttgaattgtagctcccgtactccccatgtgtcatggtgtcgtggtgtcgtggtgtcatgggagggacccggtgggaggtaattgaatcaagggggctgatttttcccatgctgttctcataatagtgaataagcctcatgagatctgatggttttataaagaccagttcccctgcacatgctcttttgccttctgccatgtaagagatgcctttgctcctccttcaccttctgccatgattgtgaggcctcccctgccatgtggaactgcaagtcttttttagagactcacaattaaacctccttttctttataaattacccagtctctggtatttcttcatgcagtatgaaaatggatgaatacagagaacattttcattatactagaaagttcccaaatgtcacttcagtaaactcatcacttcatagaggcagccatatggggaaattattagcaatgttctaataatttttccaccataggttagttttgatttgaacattcaaacaaattatatatagcataattgttttttctgtctgtcatctttgccttgatatgtggctgtgagagtcacaatgttgatgcatgcatcactagttcattcagagctatactaataactgccagggcttcattttaactataccaaccaatgtcatggtagggtgaccagctgtttctgattgcccagtctgagggcattccctgaactcagggctctcattgctagaactaggaagtcccaagaagaaagagacaggttgttcactctatgatagcatccttaaatgtcttaattaagatcattaaagaccaaacaccttgcaatatttctgtcacattaacttgtttagcaaacacttgatttacaagtctttactttatgggctgtgtttgcaaagctggagaacatgaaagattgaaacaattgtattgtgaagccacatggtgtcctgaagaggcagttgttcatttgatttgctgtatatcaggggctgaggaaaaattaaaaacataaaagaaaaaggttttgattatgaggggagaggtttctatataaatttatggagattaagaaaaccctattgccacagctacaaaggcaggtacattctgaatgtagggaaatgtatggagaatcacaacccctcatccaggggttctacaagttggctgaatattagagtcactcggggagtgttaaaaactactgatgcctgactcttgctcagaaaaaatctgacttaagtgctgtgggttatggcctgggcaccagaatttttcaagtttctcaggtaaagggcagccaagcttgagacccatctgcttaaactgttgtatgacatacattgtataatattcaactggaaacagaagcaactaaaataattaaaatacaattggtagtatctacgtagtagagaaaatgatactggattttaaacactgaatttggagtattgtaaactaaaacactgataattatctttgctattttagatgactctaataccaaaactgacagtccacatggatgataatggaacaacagggcatgaaccaccatgggaaattcgtatagacagcacactggatttttacaaaatgagcctcaaaagcaggcgagatgtctgtcactgtatgtatttgctgctaaattctactcactgtctggtgaagcatacttgatattaacttgaggaccacacacacaagttacgccaagtctatctaaactgtccttcttttattatatagactagcagaaggagtgtaagtttttctttcatatacctttttaaattttaaactaattttatggttgtctttttagaagttcatgattaaagacttcacttaggtaaacatcaaggaaattagaatgaagtgaacccaactgatatttgcaatcaacactgaagaacatgtgttgtgtttaccccgcaacctggacgcatcgtattaacataccctttaaagaatgacatgggaaatgggcttctcttgtcaggtatcacatctattatgttagtactctgacatttttggaatgaaaacctagtatgtattttggaaataaaatgtaatttcattaggtgaattactgtgacttagttataagactgtgaaatacacagagaggcctacaaaaggcatgtctaattgatagataaattatcatatttccaattcaattaagttcctatttataataaaaatcaaactattaaaatatttaagaataagcattaaacaatgctaccattcttggtatgaagtggtatgtgtaattagagcaatatttaaaataatatgaatactcatatgccattcagtaaatctctttgttctaaactgtcttcaatcactgctttatcttgacttttaaaacttaaataggatatttcagttcaccttggattttaaaaaaactttttaagtgaaaaaatatactaaaaatatataacatatatacattaattaattaataattgatatagctaataattattaagcaagcatgtatgtacccaaagccttcgtcaagaaatagaatcttgtcatccataagaggtgctcctatatgtcttttcttgactgtatctccctccctccattctagaagtaatcactattctgattttaaatccttctactgtattttttatagtttttcaacctagacatgcatccctaataatacagtttattttcccacattttaaaatttaatctaaatggaatcatagtatgtgtattttgtgttttgattatcttgctcaatattgtgtaagagctggggcagcaacctctaagttagccccattatttctgccacctggtgctcatggtcttaagtaattccaaccctttgagtaacttacttctaaccaacatcatatggtacattgaatgattaagttattattcaaaagattgtcactttcttcttgttggccagctctggtttgctctcacgctcactctcattgggtttgatgaagccagctgctataagagacagagatccatgtggtaacaactcgaagacagcccccatccaacagctcacaaggaactgaggctccctctaattgtccttgggggctgaatcctgtcaacaaccatttagtgagcctggatgcggctgcttcctagttgaggctttagatgagactctagtgacagtgaacaccttgattacagccttggaaaacactatgacacagagaacataggtaaggcatgcctgaattcttgatccacagaaactgtgagataatgtgtgttgttttaagctgttaagttgtgaagtgataatataaggcaacagtagataactagtatagatttatctggtaacatacagcccatggaagaacaggaagggatcaaaaggtgcagagaagggaggctgaggcgggtggatcacgtggtcaggagattgagaccatcctggctaacatagtgaaaccccaactctactaaaaatacaaaaagttagccgggcgtggtggcacgtgcctgtagtcccagctactctggaggctgaggcaggagaattgcttgaacctgggaggcagaggttgcagtgagctgagatctcgccactgcgccccagcctgggagacagagcaagactccatctcaaaaaaaaaaaaaagtacagagaagtggaaatattaaaatagctctggtcttaaggccaagcacctgactatatttctggggtgagtcttggagacattctgtttacaaaagcagtaaggaatgagcaggtaagagagccaccaacatcaatgagaaatttagtagtgcctattccataaagtcagcatttgtgataaaaagttttgttatagaactaagcttcccaggagtaatgggaatgataagatcccagaatagcaaagccaggaggtagcatttaactttaagaattagtgtaggtatcattatatgatatgcagcaagcaaggaatggcaaactaggcagagtgatctgtgacttacagggatctgtagttatggacaatagaacatagtggtcctcagaacaggacataggtggccaaaagggcataggaataactgcagactctatgcatcaatagctatgtctatatccatatctatatctatatccatagctagctacatctatagctatataatctacatctacagttgacccttgaacaacgggtttgaacaacatgggttcacttacacatggattttcttctgcctctgccacttctgagacagcaacaccagcccctcctcctcttcctcttcctctcagcctaatcaacatgaagatgaccaagataaagaccttatgatgatccacttccacttaataaacagtaaatatattttctcctccttgtgatattcctaataacattttctcttctctaacttacattaatgtaagaatacagaatacaatacacataacacataaaatgtgtgttgattgtttatgttttcagtaaggctctggtcaacaataggctattagtaactgagttttgggaaagtcaaagttattctttaatttctggctgcacagggtattggcaccataacacttgtctcatttgagggccaactgtatatctgtatctccacctgtgtatatgtatatttcaacagcttaagattaaacaagcaaaaagataagttgctccaatggaaattcataatcctttatccagtttccagatgtgagttgattattggacctagaatttatcaactgaaggagaggccagtcctcccaaaaacggggtcacagcaaatagtagcctcactagtcctttcccataaatacccgcagccatcttctcaggggaaagtggaatccccatgcatttggatcctgttcgataccagatctgagttgacattgacagttggaaacccaaaatgtgaacacaaaccccattaggatctcataatgatggtcggaaaataaatggagtcttgatccggattagtcttatagtagtttcacagggtgcacagaccctcatgtggtcatttacccagttctccaatgtagagttcaccaataacattccttgacctatggagtaagaattattacaataggaaaggcccaatgggagctcgtgacattgcttgggacctctcacacattctccacgcaagtgagtggatagaagcaagaaattagagacatattcaaggcttacaaatgcaggagaggtgaataccaccttcatatgattcactagttcagacccaacaaaaaccacatagatcatggcagatgacagtggatgaacacaaactctgtcaaataaaaatctaattatagccaatgtgattgatgcatgtagaatcatttctgggacaaatgaacacagtctccaatatggggtgtatggcaaccaaactggcaaatgtgtccttttcaataaccaccaggaagcagcatcagaagtgaatccatttcacctggaacagacagtggtgttaacactctgtgctgaactagggatatggtaattctcctgatctttgtcacagtatagtcgcaaaagatctaggcattgtgagcatcctacaatacagcatgctgatccacaatattgataatgtcatgtgaatcagatttgatgaacacaaaatgtgaatactgtggagaccttgctaaggatccatgtgctctagaagagaagagaaaaggattccagaggctgccacactggtaatatttttaagcatcctgtctacagcataccaggacaccactgctgaacatccgacctgccagcaagagagtggccctgagtccctcgtaaggtaccatcctatgagaggatcagccagttacttgctgctgatggaattgacatacagtcaggcgatgggcttgcattttctgcttgcagtgcctcagccagcaccgttatatgggggcccaagagaacttgttgtggcagtgtggaatcctacctaacttcacctttgactgatcaaccccatatggagcacaaggtgtgtggcaatgggcaggtaactgtagatactctgttacccacagtatactttatgctgcaccatccagaaacagctgaacggatagtgtgatgcaaccacctcttgaagccataatggaggtctcagcttggagatgacaccctgtgaggtggagcgctgttcttcaggatgcagtaagaattattacaccaatcaccatcacatggtactgtgtccacaacaggtaaaatacattaatacagaaaaccaaagtgtggacagaggagttgctcactcaccttcatgccctgtgagccacttgagggaatttgtgctccctcccaaataactgtaagttttatggagaggtcctggctccaagaagggaggagccacctccagggggcatagtaaggatttgattggaattaaagctatggttgttaccttatcactttggctggagaaaagcacataaagaaaagggctgttgccacaggcaattggcctcatcatcatgaggaagtaggaccactgctatgccaatggggacagggaggaatatatttagcacttaagtgatcctctgggacatgcttggtgcttctacttccagccttgactgcatatgagcaagttcaagggctcaagcctgataaggacacagtaaccaaggcttagagctctcaggatgaggactcgggttaccctaccaagcaagtgacctagaccagaagcaggggtgcccatgacccctcctctcatacgtttctctagaaactgtgaccaaccagttggagtgagcctaatgagagaaacagctgcagctgagcagtgccagaggtggactacagggctccctatcctgatcccatttaccagaaagatacccccatccccaagctagtgtaagtaggacagccagcagctccctttgttcacctgcacacttctccagatagttgtcctcagcttacaggagccacctcatctggaggattccgccctcttcgcatcctcttcctctcccacagggtgggccatagctagtggtaactgatgtaggattgtaaagttccaacgaccttacctctcagaaagatgggtctgtaataccattcacactctagagcttcctgtggggtcaaatgacaataaaatccttttgggcttagcctcttctacaatcctattctgtttccgacatttccttactgatttctcctgagagcattttcttataaaagtcacttgtgcaaacatcctgttttagatctttctttggtgcctccaacttagcagcatggctcagggtgaaacctttttcaatatagccttttttaggatgagaatcaccaacacggtggttgtgtcctatccctcagataaaacgatgtgaagaaaaaaacaatcaaagacaactagtttaaaagcaaacatgcatattgaaataaaaactttaaaaattaaaattcttaaaagaagaccaaaaaagtaaatgaacaaataatagaaaaaaattgtaatgcgcaaaaattgaaaagaaaaaaaacagcaaaatgttcagaggtgtccattcaggtgacagtaaactcaagagttgatcaaaatctatggtaaccattcatattgtacaaaaacattttgaaggacactaatactgagattaggaatgctgctgttttagattgtgtgctctctggggcaaacccacaaaagaggatctgagaacatgtggtatatttggacgattaacccaagaaacactggaggaaacttgaagaatgaccctgggaaggagggaaagtcattatagagtgagttcatgatcagaatgttcctgcaggcatctggtataaatcccgctgaagacctctggaagactggtttgacataccccccactggagggaaacaagccagggcatatattaccaactcccactcattctctgagtgctgttcctagaggctttaagtctccagcccagagtttgctcctttatccagagaaagtcctcaggtagagagttccaggtgcctgctctaaggaaccattttcctatgtttgaatggagagtgctgataggatagaggtggagcccctgatatcatctgctgtggtcttctccctctgcagggaagaacatcagaaaatttgacaggtaaggatgagaattcaagaaggaaaaatgagacacaatgcccgtatattatttgtatgcctcaaaaattaaaatttatttaagatagaggaatagctccatgtgataaattatggtagagagcaaatatttcaattcagggaacatggggttgacatatttcagagaaaattcaaacttgtattcatttggtagagggtagcaacatagtgtttggtgagcatatttggaggccaaactcaatccaagaattggttggaactgaggttgtccaattggccttgcatgattcagttcacaggtggatcatatcaagaatgctggttaataaaggcaggtgagtataggtgagggcatcagcagcaagagccactagagcaggttgggcggcagcaggtggacacacagcagctggggcggtagcaggtggtcctgcagcaggtggtctggccacagctggggcggcagcaggtgggctggcagtacacagactggcagcactggggtctgaagcagctggacacacagcagctgggacggcagcaggtggtcctgcagcaagtggtctggcagcagctggggctgcagcaggtgggctggcagcacacagactggcagcactgcggtctgcagcagctggacacacagcagctggggcggcagcaggtggtcctgcagcaggtggtctggcagcagctgggacggcagcagttctctaggccacagccctggtcagagcacacagagccacaacaggagttgaccatggtgtcagagggtggaggttctgggtggatttccaggaaggtgggtttggaaggtttggaagtttccttgccccagatcctcttttataccctgctaaggcctgatgtcatcagatgcaacactctttccttgttattatttgtcctgatatgtaggcaattatcaaattaggcaagtttgttgttctggttaacttatccacatagatggaaacactgtctcctttccctaatgtgttaggactccttagctcagctcttcctgaaccacctcctgtgtctctcttactatagcttcctcctagagcagccatgtgacatctgcctgtaagcacatactatgtgcttcagtctcatttgcttaacacatcatgactactcttgggtgattactattcttacaggcccttgactctttctggtgactcaggaggataaagctgcatttcagtctgatggctccttcattatgggtcagatggcctgtgaaggtttcagtgtgaaacagatttcagtgtgaaacagatgaccactggtgtgagaacgagaacaccgtaggacctatcgcttttttatcttccgcactctgaattgtgacccattttctagaccttctgatgagaaatacagagctgttttaaggtggaaaactaagctgtgaaagtttgatgtttccttttctacagaaacaaccctccaaaattcagattcagggcctcttggggaatgttggcttcagagaacagctatacttaaaggtccaagtccctcatttttttgctccctggggcagattttccttgtgactttgcctttctgccttcctagctctaacagggcacatgagctcatctctccaggttccaaaattttctggccaacccaaattagatgactcagtatcctttgcttgctctaattcgctcccagccctcttgctttctctgctgaattgctgggccttgaagatgtcctatactctgctgcttccttatagaagttgttgatccaatttcacactttacatctttgttttcaaaaaataaatcaataaagagagaaagaaagcagaaaacaggtatcaagaacaaaggatatcagcctatattttttcatgtagggatggctgactattgtttcaaaaatgtgctatgttgtcaattcattaactcatcagttaataaatatatatgtatttccccacccctgaggagtcaaggaacccagggaagggggtggaaaaatgtctgacttaccatgatagaaatgttttatgaactgggcagcctctgcagataatcaggggaggagtttcagtgtaagctggtgtttctgagggagatccaagaaccagatggaggggattggatgaatgagggagattccctttcttctctcaggtgcttataagtctaataaatcaaattgtggtgttcttatgatgctgctatgttccaagccagttcctactcctgccctggccctaatttccaggtgattcaagcagaatgaaaacaacttgggctcccaagtgaacccctgcttggtgcgctggctggtgttctgagcctgcactgttctctggctctgatgtacccagacatcatattttattgagggatgaaagtgggttccatgatgctgtggaattaagaccctgtgagccccatggtggtgtacgagaacaactctaagatttccaggagaccttgtattctggaaaagaatcgtgcccttgagaagccgtgacgattggtgcctgctgatgattcagtagagatcactttatattaactatttttcttcatgatgtgagtgtgtgtgagtgtgtgtgtgtgtgtgtgtgttttccttaagataaatttacattatatttaggaatctctcacgatttcttctagtactttaacaatttcattttttctacctctactcagctataattgaaatataaaattgtatgtatataaggtgtacaccctgatgctctgatatgtatatattgtgaaattattgtcatgatcaaattagttcacctccaccacttcacatagttaccattttttgagtgtgtgtagtgagaacattttagatctagtctttcagcaaattttaaatatacaatacagtgtaattaactacagtgaccatgctgtacattagatcctcagaacctattcttcttataaatgaatattttctccctttgaccaacatttcctcatttcctccatccacaacctttgacaatcaccattctaccctctgtttctatgagtttttagattccacatgtaaatgagattatttgtctttcattgtctgacctacttcacttagcataatgtcctcaaagtccatccatgttgtcccaaatgacaggattttcttcatttcatggctaataacatttcagtgtgtgtgtgtgtgtgtgtgtaaaatccttgcaatcttacattggtgtttgtgcctttgaggacacagtctcctcttccacactttacaagttcccttcagcagggaaagactctcagcagtcaactcggcctgggattctggacggggaagctggtagcatttgtgaacaggcagggcttactcttgggggtctctgggtgggtaaaactcctgcccaggccctgaggttcagtggggctgctgcctgggcttttgtgcagctgtggctactggctgggatccacggttaggtgtggccactgaacggtttcatttttatgttgaatattttatctggatgaaatttgttttgatttaacaaatgaaaatctctcctttttttcttcattctgtacatctttcattaatcccttttattctttcttgcttttttccctttccttcgtttattcctgaatttggctacctgttttatagtatatttgaagtaatcctttccatactgcttttaagacaccagctttaggatataattaatttgtatagactttttttttttgagatggagtctcgctctttcgcccaggccagagtgcagtggcgctatcttggctcactgcaagctctgcctccccagttcacgccattctcctgcctcagcctcctgagtagctgggactacaggtgcccgccaccatgcctggctaattttttgtatttttagtagagatagtgtttcaccgtgttagccaggatggtctcgatctcctgacctcgtgatccacctgcctctgcctcccaaaatgctgggattacaggagtgagccatgtatagacttttaagtcaatttctgggctctactcaatggcaaacttcactgtttgaaaatctctgggttagatatctctaacgtgacttccagtttacaaacctatacatttatgacttttttttgattcccttttacttgatgactcattgttatcctttatccctcccatccatgttcatgcttatcttttaaaatttgtaattgtcctcaggttcagtcatgtaaaatcccatttttaagagtatggatcctataagatatagtaattttccctacatgctcctcctaggagagaagcaattcaaaataaaatacccagccacaaatacccgaaagacatttctgtctaacctaaattatgacttaaaacagtgatataaactcttcaaaaattatttttcccaacaaccatattactaggttagtgctgaatgcaccaaagtcctccaaatattagccataattagataggccacaggaataaatacaacctgcatttttatacttctggcaacacatcttgcctgttttgtgcctatgttcatttcaaaatttaactgagacataagctaatgtttacccagaaaagtgtatttagattctcataagaatagagcgatacccttacaagaaagaataaaatattagaactctttcatccagaaagaaaatagaaggttggttaagaaactcttaaaagccttggccgggcatggtggctcatgcctgtaatcccagcactttgggagcccgaggcaggtggatcatgaggtcaggagatcgagaccatcctggctaacacggtgaaaccctgtctctactaaaaatacaaaaatttagccgggcacggtggtgggtgcctgtagtcccagctactcaggaggctgaggcaggagaatggcgtgaacccgggaggcagagatttcagtgagccaagatcgcgccactgcactccagcctgggcgacacagtgagactccatctcaaaaaaaaaaaaaaaagaatgtgactttctttatgacactaatgttatattgctctactgatatgataatgtactttaatttttgccattttcttcttcgtccttgtctaaattttgcttctaactaaagtccttaactcttgggcctattgatattatttggttatggaatggaaattatctcaaagacatgagaaactgtgataagtttgaacttccaaaagggaaagtagttgctaaagagcagaggaaacaaccagatggctgccttggagctaggctgccttgggtaaaacattcacttgtcatggggagatgagaggctgctgtaaacatggtgacacacgctataaagacaaaacagataacatttcttgacaatttgctttgcctatcccagacaagtgtggacagtaattggtatttaggtataaattataccaatgaaaatgagaaatctaccagtatttctcgctttaccttcctgctgtctacccatcagctgagtggcacccccatcatttgcaatgaccttccactgcatctgtgcttcaccttgacagccttggcattactgcttactgcactcctgcccatattttctgatccttcatgattattatcattattgaaaagaatattatttccccattttagaacatctataatttttttggtcctttcctgaggataatttttattctattaaatcctgtattttgctcaagtatatttttttttcatgtggaagtgacatcaggcagaataagcaaagccatgtggctacaggagacatatggtttgcttgtctgaatatgaccaagtttacctgagatacaagaaagctgtagagtctaagcatatcccgagagtgcattcttagctcacagcttaaaattacagcctgagtccttctcttttacaactctatcattgcctaccattcaaacccttacccaactcctccctgactcttccccaaagaggatattcccttgtccttgtgtggctccatctttgactaagagctttctcatttgcctatgacttttagtatagtaccattaacatagaggtgatgggatgaggccagtgaggtttaacttccaccaaatttggtcaacaccaactgtttcttagctcatctcagtcttgtcctcataagaatgtaaacattttcctatattttcctcctcttcatttcatgggtctgtgacctgcacatcttccctgtaccaacttaactcattctattattaaatgtgtgtatatgtatattcctaatgtcttactcttccccaagacagaaagttctcctctgatcagtactacccagcacaatctatctactttgctctttcctcttatttccaagattagacggtgagctccttttaggaagctcctgtgcctcacatatcttgatgtgatctccagagcccaacagtgcaatgaacatgacagatgatcaataatttcattgactgaataagaaacttttgttagttaaatacagcgagttatcttattttgaaaaatttatgaagtcctttctataatataagcattacattatatttacaaaatcagttttctttcctggtcgtggtaacccaaatttgtctttatcttgagagaagtaatgctaaaaaataaactgacaactaattctcaaaaaaattgaaaaaagagaaaagaattactgatattaagataatatttattgaagaacagttaatatgtaattttgaaggtcaaatcaagcataacagtcagaaacttagaggcttagtctaactgcatcatgcatctgaggtctgaatgctgctgggaagagatccatgggaaaaatgagtggtattaaatgtagatggatgccctttcaccagttacttagtggaataacaggataataaagctgatggccatttaacacatggacaagttgatataaatgacactttcatatcatgggatggtgactggctcatggttgatagtccaatatgaggttcaacaagaggatccacagcagctggggcggcagcaagttgcacggcagcaggtggtctgacagcagagtggacggcagcagctggacacaccacagctggggcggcaggtggtctgacaacagagtggacggcagcagctggacataccacagctggggtggcaggtggtctgacagcagagtgggcggcagcagctggacacaccacagctggggcggcaggtggtctgacaacagactgggtggcagcagctggggcgacagcaagtggtctggcagcaggtagtctgagagcaggatgggcggcagcagctggatacaacacagctggggcagcaacaggtggtctggcagcagctggggcggcagcaggtctcttggcagaggccttgatcacagccctggtcagagcagacagagccacaacaagagttaaccatggtgtcagagggtggaggttctaggtaggtttccaagacagtgagtttttcgaatgtgggaatctccttatcccatgtccacttttatactcagctgaggagctgttgtcaccacataaaagctatttccttgttattgtttatcttaatagataggcaattatcaagttagctaattgtgggaaaatatctgtataaaaggtggaatgcacttttattctttctctgtgttagagtttagccaatccagtctttcctcctcctcttgtcttcagttaatttagtgtgtcatttaatttcaaagacttgtaatcttactcatccagtcgattgtcaggtgacagatcacttggaactcagcattctgtgtgtcatcctgaaaactgtgtgtctcacagcagtcctcaaatgggatgatgtttcttgttttctgaagattcttctgagaaaaataaactgtgaaacaactagaagaaaacagcagaaattgtcttaaaatattagaagtggagtggattttctaatacagaaaaacttaacaacaatgaagaaaaagattgaaaaaaatttacaacagaaaaaaactcaaatgcctgattgaaaaacaagaaggctaaagagtaagctgaaaataaataataataccttaaccaatctacaaataaatgagctaattttcttaatccatgaatacctcttacaacccaatgagaaaaacaacaacaacaacaaccaaacagaaaattgagtaaaggatattaacagtgatttcactaaaaaaagaaatttaagtgccttttgagcttctgaaagatgtttagtctcactcataatttaaggtattttaattgaacaacttattcactcatcaaaccatctaccgaatacctactgtgtgccaggttctactgcatgctctcgggatatggcagtgaatacttgctatttgtaatgacaaatgtaaaatatttaagtttaaaaactttaataaattggtgaaattataaagacattgacattttaatacacagttggcagggatctaaattgaggcaacttctttagatggtaattaacagaatctgaaatttaacagtatcttaaattaatttagcatattttgaaatgtgcgtgtgttttgattgagccttttcacttctagaaatgtattcaacagatgcacctatacataccttccaagatgtaagttcaagggtattctttgcaacattgtttgcaagaataaagcctgattttaaattctattgtgtttacggaggggaaagcccttgatgtaggcaacacacactagtgctcagaggcagtgaagcatcactttctttttatcaccaaagaaacctctttgacctattcttgcaatttttctataagtgcaagacgacattaatttttaaaaaaagaaattaagaatgttatctctttaggccatccctatcccatgcagacacctactttctatttagactgagttattcaggaaggagggaagaggggatggaaggaaggatacaagaacatatttagaatatatttttatggacatattttatgactatttggggtatatataaaaattatgaaaattcagttcgttaggcataaaatggcataaaaatatccattgtgtctaagttgataatgattttactcaaattctccatatctttgtttacttttcttcttcaaatgaccgtttttgaaatagtatgtttaaagcctctgctatgattgcagttttatcaccttcctgtctatttataacaggtttttttctttgcacttagtttgaatgtagcccaacttcttatgacaacaagaatattaatatttttgcagacataattaatgtatcataaggaagtcactatcaaggtcaaagcaagtgcaggtatcataggcttgggattctggtctaactgagccacagttctatggtcacttgtttgtttagaaatagccctctctgtctgaaggcaggggagacagcttagagataacccttctccttaaaacaagtatgttttcaacatggtagttgactcaggctggtggtcaggaatgaaattcaacaacaggatccacagattggtggtctggcagcagactggatggtagcaactgaactcacagaagctgcggcagcagcaagcggtcttgcagcaggtggtctggcagcagctgggatggcagcagatctcttggcagaggtcttaaccacacctctggtgacagcagaaggagctgcagcaggagctgaccatggtgtcagaaggtggaggttctgggtgtgggttttcagtggcataaggtactagagttcataagccttcttccttccaagtttccttctctaccctgctgaggacttgccatcaccatgacctgggttatttccttgctattgtttatcttacctgaagagaaatgatcagatattctgattgaagcatgacattgtagcagttagccttggtttttaaaatggatgctaaggtaatttccatttaatcagttatttatccctaaaagcaccatttttcttccttttttgttttagcatcatctcatccattccttcatatacttttcagagtgtgtcatttgatattctgagcacaggacgagtcattcttttgttccaaccatttaatttactgttcctgaatgagctgcatagccacagtcccttcaatttgaacagtatttaaaatagatgtaaacatggatatgttaatacccaaaaaataagaccccagtacattatagcaaatagctgctaatgaaatcagcatagcacacttataaattatgaagtagctaaaaaacatctaaggcacgtggcttcaaatttaacttgttcagaatagaattgctcattctgtttcttttccgaaccaatgccctaattaattccccagtcctattacaaatggttgttagtccaaattttcaagctagggctgggcgcagtggctcacgcctgtaatcccaacactttgggtggccaaggtgggtgaatcacctgaggtcgggagttcaagaccagcctggtcaacgtggtgaaagtccatctctactaaaaatacaaaaaattagccgggagtggtggcacgtgcctgtagtcccagctactcaggaggctgaggcaggaggatcatttgaacccatgaagcgggggttgcattgagccaagatcacgcccctgcactccagcctgggcaacagagtaagactctatctccaaaaaaaaaaaatcaagctagtaaatgtaaagttcttcattcaataatcatgttttggttcccgctatgtgccaaacccattctcagggtggagacacaagtgaagaatactccaccccatcctctccttcactataacttcattctgactaaatgaactgcaccagatcattttatgggatgaactggcaatgccattacccatatgctggaccagcaaacagaggctgtgtccaccttcacagctaaggtcaggatgcctcagcagcagagatggcagaaatttttagccacagtttaagtcagagcaagtcaagctgtatcaaaagaccattttgttgccagtgaaaataagaaactctttatttgaatagattagccagatatggaaattgctaagcatccaaaatattatgcaacttattctgtgttttccccattaatacacatgatggagtcattctcgtcccgtttgttccttcatttaaaacacacggccgggcgcggtggctcacgcctgtaatcccagcactttgggaggccgagacgggcggatcacgaggtcaggagatcgagaccatcctggctaacacggtgaaaccccgtctctactaaaaatacaaaaattagccgggcatggtggcgcgcgcctgtagtcccagctacacgggaggctgaggcaggagaatggcgtgaacccgggaggcggagcttgcagtgagtcgagatcgcgccactgcactccagcctgggcgacagagcgaaactccgtctcaaaaaaaaaaaaaaaaacacacacaacggtgtttgtattttcaaactgcaattcaaagcaaaatattttagttgtctgactaactgcttttaaacttttctttgcaccactaagcgtaaacatcatgtacccagggatgtttgtacttagggccatcaacagatgtggagctcagcatggaaaagattacgacaattacaattgagcccagtcccctgtttcaggaattgagatacccaagtggagttgctattactattagaattactgtcattgaatctgtgtttgtgtgacacagatgaaaagtttgataaaaaatacattttaacggaaaatattttaaaatatggtttacatttgtcaccttgagttaatcaccatgttctagtgctggaggggaaaatgtaggtggtgacaatagttctggcctcttcaagttagtttcagttgtcaggggatcagtcaatgtactctgtcttaaagaatgataattcaggcgaggcacagtggctcatgcccgtaatcccatcactctgggaggctgaggtaggaggatcgcttaagtccagaagttcaaggccacaatgagctatgatcgcgccactgcacactagcctgagtgacaggtgaaaccttgtctctaagataataatagcagtaaaataataaataaaaatatatactttatagttaaatgatgctattgatgttgatcacctctctcacttctggatataagtttttatgggttatctattgttaagtagaacaatcatttattttcagaagattcataacacttaaggaacacttcgtccctgggcaattccctataggttatgaaaaataatgtcataaataataaccaggaaaattctgctcattggttccagatttgggaaccagtgtataaaaggtccagatactagaagggggtcatcagattcttggaaactcacctctgaacaggagcccacccttcacccctgacaccatgacccactgctgttccccttgctgtcagcctacatgctgcaggaccacctgctgcaggacaacctgctggaagcccaccactgtgaccacctgcagcagcacaccctgttgccagccctcctgctgtgtgcccagctgctgccagccttgctgccacccaacttgctgtcaaaacacctgctgcaggaccacctgctgccagcccacttgtgtggccagctgctgccagccttcctgctgcagcacaccctgctgccagcccacctgctgtgggtccagctgctgtggccaaaccagctgtgggtccagctgctgtcagcctatttgtgggtccagttgctgtcagccttgctgtcacccgacttgctatcaaactatctgcttcaggaccacctgctgccagcctacctgctgccagcccacctgctgcaggaacacctcttgccagcccacctgctgtgggtccagctgctgccagccttgctgccacccaacatgctgtcaaaccatttgtagatccacctgctgccaaccatcctgtgtgaccagatgctgcagcacaccctgttgccagccaacctgtggtgggtccagctgctgtagccaaacctgcaatgagtccagctattgtctgccttgctgccgtcccacctgctgccagaccacctgctacaggaccacctgttgccgccccagctgttgctgcagtccttgctgtgtctccagctgctgccagccttcctgctgctaatccacttgctgcagacccaccacccaccagagacatatttcctgaaacattttgtcaaagttcctattccaccaagaaacattcgctaagcttttctgagaaacaacattctgacactgaactttgtgatcatcttcttcctaccatgcttgggattctgctgaaggtttgcagtctacctcactttcattcttcttcattccctctgtgttaatgtaccagatggtggtcagtcaactccacctaattgacatggatacatggactcagccacagaaagtggtcatcagcttttgcccctatggaacttaaaaaaaaattcttaagactgcatatctaactctctataatgatcaatactgatcatctttttagatatatacattttatttagtagcctctgccagattactaaactctttcatgatcacttttaattgtctccctacctggtctttcctaataaaatttatattatcctgcatcctatggtatgatttttgttccatttgtttgtttgtttgcagcagttgctttgtgaagccttacttttgagttgtggtttatatttattatcttgttcaagtctcacaatgacctacaagttggacagagcaaacattttagtgatgagaaaatgatttgccatacaactagcaattgacaagggaaggttcaatgaccaggtactttgaatccaggttaaggacacttttttaaaaacatttttctccgggtagatgcaacagtggtgattgagtgcagggaagatgtacattttaagtcacatctcaagcaaacacttttctatctacaaagcacttcccaaatactctccccacctctatgaccactagagaccatctttaagagttctaggaatgcttttacactcttggtgggagtgtgaattagttcaaccattgtggacaacagtgtggctattcctcaaggatctagaaccagaaatgccatttgaccaagcaatcccattactgggtatatacccaaaggattataaatcattctactataaagacacctgcacatgtatgtttattgcagcattatttacaatagcaaagacttggaaccaacctaaatgtctgtcagtgatagactggataaagaaaatgtgtcacatatacaccatggaatactatgcagccataaaaagattgagattatgtcctttgcagagacatggatgaagctggaagccatcatttcagcaaactaacatagaaacagaaaaacaaaacactgcatgttctcgcttataagtgggagttgaactgtgagaatacatggacacaggaaggggaccatcacacaccagggcctgtcgggggatggggggcaaggggagggagagcattgagacaaatacctaatgcatgcggggcttaaaacctagatgacaggttgttaggtgcagcaaaccaccatggtacatgtatacctatgtaacaaacctgcacattctgcacgtgtaacccagaacttagagtaaaataaaaaataaaaataaataaaactttttaaaaagtgttctagtccatgaaaagagctttgtgtctctggattctgatccaccactgaagaatctgtcaccaacaactagtgtgacatgggttttcccggccctactctcaccacgaagaacctcctctttgctgtcatgattaagcatctgggtatcatttcatttattttaacaggaattaggattaagaatcacttttgcaaagcgcacaagattggaccatgcttcctgggttcccaaattttgaggcaattttgtttcctaacatgaactttgttaagggaagataaatttgtacagaatcctaagaattaaggtaaccatgcaatggacttatgccctttgatctaatcataatctctgggccataaaagaaaacaaaataactccctgtgttttatgagataaagaagataaagtcaattatgctaaaggaagtcaaaatcagaattttcagaaaaaaagggagaaatgttagaaacatgaaaatgggaacaaatgatgcactatttaaagccaagatgggcattaagttggttcctaaatggaggaaactggatcttctgatgagaaactgaataaggaaaggaatagccagaggacgcagcagtacgaaggctaattcagctttgggaggacactaagaggttttgactgtggccaccttctttttaattattattattattttttaattttaatttatatatttttatatttttttattatactgtaagttctagggtacatgtgcacatcgtgcaggtttgttacatatgtatacatgtgccatgttggtttgctgcaccgattaactcatcatttacattaggtatatctcctaatgctatctctacccgctccccccaccccacaactgtggccaccttcttaagagacctgaaggtgctttgggtgagcgaactactagatgtgacagagacatgtcatcttcctaggggatgtatctggaattctctgccgggttattaactttccaacagggggaatgaatgggtaatttgctgacatttactgagagcctgctatacactaggtattgaggtagttgctccatgcgccctctgtctcattcccaggcaatcccaaaggtaagtattagtggccccatgttcaagctgaggaagtcagtgttgaagaagttaaagcaactcatatgtgttgcataaatgatacaacatttttctgctttccaaaacaaagctgtttgggggaagtactggtgaaatgagagatatagatcaatggaaaatattgagagacaagaaagagattcacatatatattatcaattgattttttgacaagatgccaagtggatatacagataatctgtggtcttttgaataaacagtgctggaacaattaaacatccatgagcaaaaagaaaaaaaaatagaactttgatttatacattacatatatacaaaaataagctcaaaatggatcacaggccaaagtgtaaaacctaaaactacaaaacttttagaaggaaacatagaaaaaagttttaggactgtagattaggtgaagatttcttagatgaatacataactccctcaaaaagtgggcaaaggatatgaacagacacttctcaaaaaaagacatttatgcagccaataaacatatgaaaaacagctcaacatcactgatcattagataatgcaaatcaaaaccacaatgagataccatctcatgtcactctgaatggcgatcattagaaagttaagaaacaatagatgctggtgaggtatggagaaatgggaacgctattacactgttggtgggaatgtaaaatagttcaaccattatggaaggcagtgtggcgattcctcaaggatctagaaccagaaataccatttcactcggcaatcccatttctgggtatatacccaaaggaatataaatcattctgctataaagacacatgcacacgtatgtttattgcaacactatttacaatagtgaagacttggaacaaacccaaatgctcatcaatgatagactgggtaaagaaaatgtggcacatatacaccatggaatactatgcagccataaaaaagattgagatcatgtcatttgcagggacatggatgaagctggaagccatcatcctcagcaaattggcacaggaacagaaaaccaaacaccacatgttctcactcataagtgggagttgaacaatgagaacacatggacacagggaggggaacaacatacaccagagcctgtctagggtggagggcaagaagagggagagtattaggacaaatagctaatgcatgccaggcttaaaacctagattacgggttgataggtgcagcaaaccaccatgacacatgtatacctatgtaataaacctgcatgttctgcacatgtatcccagaaattaaagtacaattttaaaaaaagtaaactgatatccaaaacacattgcatcatatcatggctatgtagatttttgcccaaaaactttcagttaaaagttaaaatgaaaaaaataaagttgagatgaaatggggaaaaaaatagaataggtaagattgtgaatatccagcaaaagttctgtgaactcaattctaacaaagcagaagttgtggttaataaggtcagtgatggtcttcacaatagcaaagacatggaatcaacctaaatgcttatcaatggtagactagataaagaaaatgtggtatatgtatgccatggaatactacacaggcataaaaaaagaatgagatcatgccctttgcagcaacatagatggagctggaggccattatcctaagcaaactaacaccggaacagaaaattaaatactgcttattatctccacttataagtaggagctaaaaattgagtaaatatggacacaaagatagggacaacagagatacctgtgtctacttaagggtggagggtgggaggggggtgaggattgaaaaactgcctgtcaggtactatgctgattacctgggtgacaaaataatctgtacaccaaaccctgcaacatgcagtttacctatataacaaacctgcagccgggcgtggtggctcacgcctgtaatcccaaaactttgggaggccgaggtgagtggatcacctgaggtcaggagttcgagaccagcctgaccaacatagagaaagcctgtctctactgaaaatacaaaattagccgggtgtggtggcgcatgcctgtaatcccagctgcttgggaggctgaggcaggagaatggcttgaacccaggaggcggaggttgcagtgagctgagatcgcaccattgtgctccagcctgggcaacaagatctaaactccatctgaaaaaaaaaaaaagtcctgcacatgtacccttgaacttaaaataaaagtgaaaaaaaataaagaaataaagtcagtgatgaagaccttgggaaacagtgagcatcttaaagtctgcaaaggctggggagaagaaatacgcctggtaagaatgtcatctgttcagtaagaaggcagatgccagagcttagaagaaatttaaggtgatttttttgggacgaagcactgggagaaaagatggctagtaagagtaggaacctcacaggaattcctttcggttcattccatttgcaaatgatcccaatgaggaaaaattgccagaggcctagagtggaaggagctaatgcaaaaattattctggcaatgtgaattctaaacactattgggatgcaagcgttggctggacaatcattagaacattgtgccaaggattcgcagtgtctggtaattggttattattattggacttcagaggtcacttcagttcttgagatacttcaaaagttcccaaatgtttttgttggattcaaaattgaccattcgctgatttttgaagtccataagcaacaaaatatgtaaaatatgtaaaatttaaaaagaaacacaaagtgccatacatacttattaggcatcctttggaggaaacaggaaggctgtcttccagggtagtaaatactaccttgaaaaacgtaccagtatctggccttcagccttgcacactccagaaactgaaattatttacattctaagagtgaaaccacctctgggagcaggctcactttcaccaagcccataacattagtaccagttgaagaatctacatgagaaataacttaaagagaagatgacattttcatgggtctttttgaccaggatattttcttcctatagatatacctgcatgaaaagtgaaattataaccaaaggttattttcttttttataattaaactttttgagataattgtagattcacatgcagttgcaagaaataatacaaagaaacctctgtactctttaccaagtttccccccaatgataacttcttgcaaaactacagtacggtatcacaagtccaatggtgacattgataccttcaagacacagagtagctccatcagcacaaggatcccttgtattgccctaaaagcttattttctcagcaaatatttagaacattctaatattctagaagttctaataatacggaatggcatctaatgcatttgttctaaaacagattttgccaggcactctggaaaattcaagtgccttgggtggctctccctcccccatgcaatgtgtcgtaaccagcacttctgaatttgtctcagactctctcttttctctaagctgccatggctcaccaaacctccacccccatttataagtcccaggttctttttaaaaccatcttcaatcaacttacagtaatttctgcaggtcttgaagcagcccctcccatgttccccaacttctgatacaacctcatttatgcctttgcctcataaagacctacaaaacatttttaattttgtttacttttgccatcatatttatggatcatttatgaagtttcaggccatagcatacaaattatattttaggcaactccggattttgtccactttctctttcttccaaataaaaatataagctgcagccatgcaggtctgtcttcagaaactggcatgggctctttgttatcattagacagtaacatgacatcatacacctgtttgtgtgattcccccatcacactccttcccctgggatccctcagtgagttctgatggtttatgcacatcctactgcaatttttcctatgactgccattaaacataaaagacaattccacacttcagtcctctattaaaatataatattattatggacaagaccaagtaatgctttcacgaaatggtttttcattttctttagctctgtccagtgtacaatgtatgtaacaaaacttccctatttttccactggagaacctccattcagaattccccctagatggcagatgttggcatgattttactccagtatgtgttttaaaaagaaaaggaatgacactccctaattccaatcccagctataacattgatagtttaagaagtgtgagagagcccccagaactgccaatattggaagtcctatcaacatcagattgactcactggagaattgtgaggtttgttatgttcagagtttgctcatgtgtaaaatgtggaaaaatggaaaaagaatcagaggaacatgtataatgattcccactgaggttaacaagtgtagatttgtttctaagatattaagaacttcatgaaattatagaaattttgaagactgataatactgatattatatgaaattatagaaattttgaagactgataacactgtattatgtaagttgttctgagagattcccacggtatttgtatgatgtttcaataccttctttcagcttagataagaatattggaatcttctgaaaatcgatatcagaatctacccaacctaaaagctttctactgtacctgtctaattaatataaaagcttgagagtacttgatataagtataaataaatgatataaaggcttgagaggatgttgatagaacttctagggattggatttagggagtgtccttccttttctttttaaaacacatactggagtaaaatcatgccaacatctgaagtcccctcagaatggagtacagatattatgaatccagattcaccaagaagttagtttttttttttttaatttaaaaagctgctcatgctgggaatgtaaactggtacaaccactgtggaaaatagtgtggagattccttaaagaactaaaagtagaactaccatttgatccagcaatcccaaaactggatatctacccagaggaaaagaagtcattatacgaaaaagatacttgcacgtgcatgtttataacagcacaatttgcaattgcaaaaaatatgaaaccagcccaaatgcccatcaatcaatgagtggaaaaagaaatggttgtatatatgatggaatactactcagccatagaaaggaatgaattaatgacacagcaatctggatggaattggagactattattctaagagaagtaattcaggaatggaaaaccgaacctgaaatcttgtaagtgggagctagctatgaggatgcaaaggcataagaatgatacaatggactttggggactcaggggaaaagatggaaggggtgatggataaaagactacaaattgggttcagcatacactactcgggtgatgggtgcaccagaatctcacaaatcaccactaaagaacatactcatgtaaccaaataccacctgttccccaaaaacttatggaagtaaatttttttttaaaaaaaaagctgctcagctctgtctgatgcatgatctcgtggtaacagtggaagtggtcagatgtttgtccgatctccaaaacccatgttcttctaccttttaaagataaaatgcttcttaaaactgtttcatcggggcatggtggctcacgcctgtaatcccagcactttgggaggctgaggcaggtggactgcctgaggtcaggagttcgagaccagcctggccaacatgatgaaatcccatctctactaaaaatagaaaaaaattagctgcgcgtagtggcgtgtgcctgtaatcccaactacctgggaggctgagacatgggaattccttgaaccaggaagatggaggttgtagtgagctgagatcgcaccactgcactccagcctgggcaacagtgagactccgtcaaaaaaaaaaaaaaaacaccactaacacacacacaaaaacctgtttcttcctttgttaaattaaatttctaattaaaatttttatttttaaagaatagagattggcatgccattgtaagatgtgatacaagagatccatgtactctttgcccagtttccccaaaaaataacatcctccaaaactatagaaaaacatcaccaacagcatatgatattgatattgacatagccaatgtacaacacatttctgtcactgcaatgatctcttttgattgttcttttatagccactctcacctgcctcccacacccactcctttctttatacctggcaaccaccaatctgttcttcatttgtataattctgtcatttcaaggatgttgtataaaaagaatcatacagtgcttaacattttgagactggttttttcaacacagcataattccgtgaaaatttaaacagattgttgaacagtttttcctttttgtcactaagaattaccctctggtatgtatgtaccacagtttgtttgatcatgtgttgaaggacatctgggtcgcttccagttcaaagcagccataaacattcatgtacaaacatttgtgtgaacaagtacaattactgagttgtatggtagttacatgtttaattttttttttttttttttttttttacagagtcttgctctgtcaccgaggctggagtgcagtggcactgtctcggctcactgcaacctccgcctcctgggttctaacgattctcctgcctcagcctcccgagttgctgggattacagacatgcgccaccacgcccgctaactttttgtatttttagtagagacagggatttaccatgttggccaagctggtctcaaactcctgacctcaggcaatccatccgcctcagcctcccaaagtgctgggattacaggcatgagccactgtgcccggccagcatgtttaatttttaagcaacagcatcaactgtttgcagagtgtctgtaccattttacatgtatgactgattctgtttctttgaacactcaccagcatttattttagccattttgataggtgtgctaacttttcgtggttttagtttgcatttccctaatggctaatgatgttgaacatcttttcacatgcttatttgtcatctgtatatctttttccatgaaatatttcttcatgtcttttgcccatgctgtacttttagtgtttgctttctaattgttcagtttttaaagttctttatacattctaggtactactcctttgtcaaatatgtgatttgcaaatatatatcatgtatagttcacagcttgtctttttctcctctgttcttttgcagaacataatttttttaatcaatttattaatttctctttaatggatcatgtttttggtgctacctaagaactctttggtcttacatgctaaagattttcttccatttttttctaaaagttttatagttttatattttatatttaagtttgtaatttatttttttgattcttttttgtttgttttgttttgttttctttcttttttttattatactttaagttttagggtacatgtgcacattgtgcaggttagttacatatctatacatgtgccatgctggtgcactgcacccactaactcgtcatctagcattaggtatatctcctaatgctatccctccccactcccccgaccccaccacagtccccagagtgtgatattccccttcctgtgtccatgtgatctcattgttcaattcccacctatgagtgagaacatgcggtgtttggttttttgttcttgcaatagtttaccgagaatgatgatttccaatttcatccatgtccctacaaaggacatgaattcatcattttttatggctgcatagtattccatggtgtatatgtgccacattttcttaatccagtctatcgttgatggacatttgggttggttccaagtctttgctattgtgaataatgccgcaataaacatacgtgtgcatgtgtctttatagcagtatgatttatagtcctttgggtatatacccagtaatgggatggctgggtcaaatggtatttctagttctagatccctgaggaatcgccacactgacttccacaatggttgaactagtttacagtcccaccaacagtgtaaaagtgttcctatttctccacatcctctccagtacctgttgtttcctgactttttaatgattgccattctaactggtgtgagatggtatctcattgtggttttgatttgcatttctctgatggccagtgatgatgagcattttttcatgtgtcttttggctgcatacatgtcttcttttgagaagtgtctgttcatgtccttcgcccactttttgatggggttgtttgtttttttcttgtaaatttgtttgagttcattgtagattctggatattagccctttgtcagatgagtaggttgcgaaaattttctcccattttgtaggttgcctgttcactctgatggtagtttcttttgctgtgcagaagctctttagtttaattagatcccatttgtcaattttggcttttgttgccattgcttttggtgttttggacatgaagcccttgcccatgactatgtcctgaatggtgatgcctaggttttcttctagggtttttaggttttaggtctaacgtttaagtctttaatccatcttgaattgatttttgtataaggtgtaaggaagggatccagtttcagctttctacatatggctagccagttttcccagcaccatttattaaatagggaatccttcccccattgcttgtttttctcaggtttgtcaaagatcagatagttgtagatatgcggcgttatttctgagggctctgttctgttccattgatctatatctctgttttggtaccagtaccatgctgttttggttactgtagacttgtagtatagtttgaagtcaggtagtgtgatgcctccagctttgttcttttggcttaggattgccttggcaatgcgggctcttttttggttccatatgaactttaaagtagttttttccaattctgtgaagaaagtcattggtagcttgatggggatggcattgaatctgtaaactaccttgggcagtatggccattttcacgatattgattcttcctacccatgagcatggaatattcttccatttgtttgtatcctcttttatttccttgagcagtggtttgtagttctccttgaagaggtccttcacatcccttgtaagttggattcctaggtattttattctctttgaagcaattgtgaatgggagttcactcatgatttggctctctgtttgtctgttattggtgtataagaatacaccaattgtgatttttgtacattgattttttatcctgagactttgctgaagttgcttatcagcttaaggagattttgggctgagacaatggggttttctagatgtacaatcatgtcgtctgcaaagagggacaatttgacttcctcttttcctaattgaataccctttctttccttctcctgcctaattgccctggccagaacttccaacactatgttgaataggagtggtgagagagggcatccctgtcttgtgccagttttcaaagggaatacttccagtttttgcccattcagtatgatattggctgtgggtttatcatagatagctcttattattttgaaatacggcctatcaatacctaatttattgagagtttttagcatgaagggttgttgaattttgtcaaaggctttttctgcatctattgagataatcatgtggtttttgtctttggctctgtttatatgctggattacatttattgatttgtgtatattgaaccagccttgcatcccagggatgaagcccacttgatcatggtggataagctttttgatgtgctgctggattcgttttgccagtattttattgaggatttttgcatcaatgttcatcaaggatattggtctaaaattctcttttttggttgtgtctctgcctggctttggtatcagaatgatgctggcctcataaaatgagttagcgaggattccctctttttctattgattggaatagtttcagaaggaatggtaccagttcctccttgtacctctgatagaattcggctgtgaatccatctggtcctggactctttttggttggtaaactattgattattgccacaatttcagctcctgttattggtctattcagagattcaacttcttcctggtttagtcttgggagagtgtatgtgtcaaggaatttatccatttcttctagattttctagtttatttgcgtagaggtgtttgtagtattctctgatggtagtttgtatttctgtgggatcggtggtgatatcccctttatcattttttatggtgtctatttgattcttctctctttttttctttattagtcttgctagcggtctaccaattttgttgatcctttcaaaaaaccagctcctggattcattaatttttgaagggttttgtgtgtctctatttccttcagttctgctctgattttagttatttcttgccttctgctagcttttgaatgtgtttgctcttgcttttctagttcttttaattgtgatgttagggtgtcaattttggatctttcctgctttctcttgtgggcatttagtgctataaatttccctctacacactgctttgaatgcgtcccagagattctggtatgttgtgtctttgttctcgttggtttcaaaaaacatctttatttctgccttcatttcgttatgtatccagtagtcattcaggagcaggttgttcagtttccatgtagttgagcggttttgagtgagattcttaatcctgagttctagtttgattgcactgtggtctgagagatagtttgttataatttctgttcttttacatttgctgaggagagctttacttccaactatgtggtcaattttggaataggtgtggtgtggtgctgaaaaaaatgtatattctgttgatttggggtggagagttctgtagatgtctattaggtccgcttggtgcagagctgagttcaattcctgggtatccttgttgactttctgtctcgttgatctgtctaatgttgacagtggggtgttaaagtctcccattattaatgtgtgggagtctaagtctctttgtaggtcactcaggacttgctttatgaatctgggtgctcctgtattgggtgcatatatatttaggatagttagctcttcttgttgaattgatccctttgccattatgtaatggccttctttgtctcttttgatctttgttggtttaaagtctgttttatcagagactaggattgcaacccctgcctttttttgttttccatttgcttggtagatattcctccatccttttattttgagcctatgtgtgtctctgcacgtgagatgggtttcctgaatacagcacactgatgggtcttgactctttatccaatttgccagtctgtgtcttttaattggagcatttagtccatttacatttaaagttaatattgttatgtgtgaatttgatcctgtcattatgatgttagctggtgattttgctcgttagttgatgcagtttcttcctagtctcgatggtctttacattttggcatgattttgcagcagctggtaccagttgttcctttccatgtttagtgcttccttcaggagctcttttagggcaggcctggtggtgacaaaatctctcagcatttgcttgtctgtaaagtattttatttctccttcacttatgaagcttagtttggctggatatgaaattctgggttgaaaattcttttctttaagaatgttgaatattggcccctactctcttctggcttgtagggtttctgccgagagatctgctgttagtctgatgggcttccctttgagggtaacacgacctttctctctggctgcccttaacattttttccttcatttcaactttggtgaatctgacaattatgtgtcttggagttgctcttctcgaggagtatctttgtggcgttctctgtatttcctgaatctgaacgttggcctgccttgttagattggggaagttctcctggataatatcctgcaaagtgttttccaacttggttccattctccccatcactttcaggtacaccaatcagacgtagatttggtcttttcacatagtcccatatttcttggaggctttgctcatttctttttattcttttttccctaaacttcccttctcgcttcatttcattcatttcatcttccatcgctgataccctttcttccagttgatcgcatcggctcctgaggcttctgcattcttcacgtagttctcgagccttggttttcagctccatcagctcctttaagcacttctctgtattggttattctagttatacattcttctaaatttttttcaaagttttcaacttctttgcctttggtttgaatgtcctcccatagctcagagtaatttgatcgtctgaagccttcttctctcagctcgtcaaagtcattctccatccagctttgttccgttgctggtgaggaactgcattcctttggaggaggagaggtgctctgcgttttagagtttccagtttttctgttctgtttttttcccatctttgtggttttatctacttttggtctttgatgatggtgatgtacagatgggtttttggtgtggatgtcctttctgtttgttagttttccttctaacagacaggaccctcagctgcaggtctgttggaataccctgccgtgtgaggtgtcagtgtgcccctgctggggggtgcctcccagttaggctgctcgggggtcaggggtcagggacccacttgaggaggcagtctgcccgttctctgatctccagctgtgtgctgggagaaccactgctctcttcaaagctgtcagacagggacatttaagtctgcagaggttactgctgtctttttgtttgtctgtgccctgcccccagaggtggagcctacagaggcaggcaggcctccttgagctgtggtgggctccacccagttcgagcttcccggctgctttgtttacctaagcaagcctgggcaatggcgggcgcccctcccccagcctcgctgccgccttgcagtttgatctcagactgctgtgctagcaatcagcgagactctgtgggcgtaggaccctccaagccaggtgcgggatataatctagtggtgcgccgttttttaagccggtctgaaaagtgcaatattcgggtgggagtgacccgattttccaggtgcatccgtcacccctttctttgactcggaaagggaactccctgaccccttgcacttcccaagtgaggcaatgcctcgccctacttcggcttgcgcactgtgcgcgcacccactgacctgcgcccactgtctggcactccctagtgagatgaacccagtacctcagatggaaatgcagaaatcacctgtcttctgcgtcgctcacgctgggagctgtagaccagagctgttcctattcggccatcttggctcctcctcttgtaatttattcaagttaatttttaggggtttttttcctctagatgtctaattgctctagaacaatttgtttaaagggatagcattcctctattgaattgttggtgtacctctatcaaaaattggctagggatacagccaatccttaaacaatgcaagggttaggagcagcaaacctccacacagctaaaaatatgcatataacatttgactcccccaaaacttaactacatatattctactgttgactggaagacttatcaataaaataagcagtcaattaacacatattttgtatgttatatgtattatatattgcatttttataataaagcaagctgaagaaaagaaaatgctattaagaaaatcataagaaatagaaaatatatttactgttcattaagtggaagtggatcaccataaagatgttcatcctggttgtcttcatgtcgagtaagctgaagaggaggaggaagaggaggggttagtcttgccatctcattagtggcagaggcagaagaaaatccacatataagtggacctgtgcacttcaaacctatcaactgtatttgtgtaggtctatttctaggttctttgttttaatccgttcattcagctgtccattcctcctccaataccacacagccttgattactgtagctacatcataaatcttgaaattaaatagactgattccatccacttcattctttgaaattgttttagctattctagttcttttgtctttctgtatacattttggaagatcttattgatatctacttttttaaaaacctgctgtggtaagccctgtacatgttttttaaatttacacctaagtatgttttagagagattgtaaatgacatttatttcaatttctgtgtccatgcattcattgccaatatatagaatacagctgattgtgtatgtttatcttgtagcttccaatctttcaaaactcattcattagttctcagagtttgcttgcttatttgtttgtttgtattcatagattccttgagattttctatgtagataatcatgctacctacaaacagagacagttttatttcttcctttcctttatttttttttcttgccttattgtgctggttaaaactttgagcactgtgtagagtaagcagtgagatttagtatttccagttcaggggaaagcattcgatctttcactgtcatttatattttcaaagaaccagctctttgtttcactatttcacattgttttcttcattattattctgttttcaatttcattgatttctgcttttatatttattatttccttccttgcgcttgcttttagtttatttttctcttctttttctaggttcttgaggtgggagcttagataattaattgagacttttcctcttttcaaatgtatgcatttaatgctatgactttccctctcatcacagctttaattgtgtctcgcaagttttgacatgttgtattttcattttcattcatttcaatgcatttttaaaaaatttcccttaagtattctttgatgacctagagattattcaaaagtatgctgtttagtttccaagtgtttgaagattccccagttatctttctgtcattaatttctagtttgagtccattgcagttggagaacatactctatgatttcaactcttataaatttgttgagattgttttatggctcaagatgtggtccatcttgaaatatattccatggacacttgaaatgaatgtgtattttactattgttggatggactgttctataaacgttaattagatcctgttggttgatggtgtttttgagttcttccatatctttgttgattttctactcattttagttcttttctgtcagcacttgaaaaataatgagaaatccactgtagttttaattgttttcccctaaagataaagtttttctttctcttgttgcatttacaactttttctttatctttacttttcagaagtttaactactatgtgtgttggcacaaatttctttgagcttatcctgtttgggatttgttcaccttcttgaatttgtaggtttatgtctctcggttaattggggagattttcaactatattgtttttgagtactttttcacccctgccctctttcatctttccttctaggactctggtgagatgaatattagataatttgttttagtcccacaggtcccttaagctctgttaaatttttaggcttttccagtgtattttctctgttgtttggattggacatttcctaatgttctatcttctagttcactgatacttttctttttacctccgttctgctgttgagccatcaactgagccttttattttggttattgggtttttgagttccaaaattcacatatatcattttatcttttatttatttgtggcactttctactctttcatttgtttaaagtatattttaaacatacactttatgttttgctcattgacttttcttttttttagacggagtcttgctttgtcaccaggctggagtgcagtggcccgatcttggctcactgcaacctccaactccctggttcaagcgattctcctgcctcagcctcctgagtagttgggactacagggggccgccaccacacccagataatttttgtgtttttggtagagagagggtttcaccatgttgtccaggatggtctcaatctcttgacctcaagatcctcccacctcggcctcccaaagtgctgggattacaggcatgagccaccacgcctggcttcattgatgtatttttatcatgacttgctttaaactctttgtcagataattctaacatatctgatatctcaacgttggcatttattgattgtcttttttcatccagttacatatcctcctggtttttgtatgttaagtgatttttattagtatctggccctgtttgtattatgttatgaaactctggatcttatgtaatcttttgttttggctggctttctctgacattgttctagcaagggactaggggctacctcattactgtcacatgaaggtagattagttcccctattcaacctgtgctgacaatcaaggtaggggagcacatcattactgctgagcagagatgagaactccggcccttcacatggtctacactggcactctatgtctatgtctgttggggacgggggtcattactggctggcagagattagtctgccagccctacttggccttctcagacattaactcagtgggaggtgttagggaaactcattacagcttctcagggatggaagtctatctcctcacccggcttttactggagtgattggcagtgaagctgtagttgtttctggagcacagcagataccatctaaatgtttttcttcttgctaagccacctcttttctgaccctttaggtagagagaagcatttattggaactgtgtgtgtgtgtgtgtgtgtgtgtgtgtgtgcatccactagagtttcagagttacaggcttctcaagctccaagtctggggggtacttgcagcacaaagaaaacccagagaaccccaccttattgttccttaagtcctgaggcttctagcctggctgctttcttcactccacctttcagagtcctctcgtgtttgctttatatataatatccagaatttttagttgtacttagcagaaagaatatggaaaagtctgtccactccatcttcccagtcagcaaatcttcaactgggttttaactaaacataataaatgcatttaaagacataaaggaagctattaccaatatagacaaatacaaaaacacacacacacacaacatgaataagaaccaaccagagactatcctgcaacggcattaacattttggttttgatcattgggctgtgacaagaaacacacactgaagtacatagggataaagtggtatttagtgataaagggaaattctatctgcaacttacttttaaaaaccaacagtagtaacacatatatgtatagaaataatgttaaagaagcatggtaaaatgttaacatttgaggaatccaagtgaaggcatatgggaatcctttgtactgtgtttacaattttctatgagtatgaaattatttcaaaatgaaaaattaataaaaacaaacatgtataatggggtaggagacacaagcaggcataatatctgatactaaattaataatagagcatatagtcattaaagtacacaataagtgagataagctgcagaagatatactgacttggaagaccaaaatggaagaatctctaatgttaaggaaaaaatgtgtaactcaattataatgaaaatattacatatcaagacttgtggggtgttataaaatgatctttgataaaatgtacacactttaaatagcctttaatatttaaatattaaacaagaataaaacctaaaaataaatgaactaagtgttcacctaagtgaataagaaaaaggaaaacaaccaaaatagcataaaatgtaaatcaatgaactagttaaaaacgacatcacagagaagatgaacaaagccaaaatttctttttcaaaaaaaataccaataaatgataagccattgaaaagattgatcaagaaatgtaaagaagacacaaataaataatattctggatgaaaatgagaacatatccagcaataaagctgaaaatgttccataatcaaaggaatcataatcaaacctgtttccagtatttacatggaaaagtatttacatggaaaagatgaacttggattctgatcactcatcatgtaggaaaaaaatcaattccaggtgtatcaatatcttgaaggtcaaaaaaaatcttaaatcctcactagatgatttatgtgattttttttatttttaggtagataaatacctcctgaccaagacaaaaatattattattcgaaaagaaatgactgataattttaactggataaagctttagaaaacttaaccatcaaaaatcacatttcagactgagagaaggaattgtgataaacccctttaacgcctatctctcctctgctctctatgtggactctatttcttctggcatttggccataacagctgcagctgctgcagcaggtggactggcagcaggatgtgctgcagcagcaattttgaaaacatacaaacccatgtgtttctttttttaccccatgtgtcttccttcaaggatcataacccaaagctgattgtcatccaatatctgcaaacagttgttttatatatttacaaagcttttattattgtttatagcaggaggataaatcttatactagcttctacattacaggtggcatcacaagccctccctaaacttggtttttaactcatcaccatgactcaacatcatcctatcttcagaggtactttccaaagtaaatagcaataaggaaaaacagatggtgactaacaattgtcctgacatctcactaagctacataggacctgttagatgaccaaatactgtactcagctttaaaaatgaggatcagtgcttaattggtagggagaatgattcatttctcagttcaggaaaatagtcctgactggttatttgtcaattaagaaagcaaataaatcaattactcaaagaaaattcacagcactgaatagacaacttcctccttgggacatttcccaaaagactagagaagtatcaaagacaagttctgctcattaatcaaaactttggggtaccatgtataaaaggttcagattgaataacgttatcaaactctaggaaactcacctctgaacaggagtgcaccctccacccctgacgccatgacccactgctgctccccttgctgccagcctacgacgtgctgcaggaccacctgctgtgtgtccagctgctgccagtcttgttgccacccccccagttgctgcaacacatcctgctgccaacctagctgctgtgcacccgtctaccagagaacgtgctaccattccatgtgtgtctgcctgcctagttgcctagaccagatatgtggatccagctgctgccagccctgctgcctgctgcccagcctactgtgaggccacctgctgcaggaccacttgctgccagtacacctgtgtgacaagctgctgccagtcttcctgctgcagcacaccctgctgccagcccacctgctgtgggtccagctgttacggccaaactggcagtgggtccagctgctgccagcccagcttctgtgcacccatctactacaggagaacttgctaccaccccatgtgtgtctgcctgacaggttgcctaaaccagagctatggatccagctgctgctagccctgctgccaatcagcctgttgtgtgtctaggggctgccagccttgcagttattgatcaacttaccacagattactacctgcatagaataaacttccatcatcagaccagccaggtatccatttattctttttttttttttttttttttttgagacccagtttcgctcttgttgcccaggctggagtgcaatggcatgatcttagctcaccgcaacctccacctcctgggttccagccattcccctgcctcagcctcccgagtagctgagattacaggcatacgccatcatgcccagctaattttgtatttttcgtagagatggggtttctccatgttggtcaggctggtctcaaacacctgacctcagatgatccacccgccttgacctcccaaagtgctgggattacaggcatgagccaccacgcccaggccagatatccatttctatggcaaactcactccacttcctctgctgataacatacatactgtcactaaactgtcagtcatcttcttgttaacaaattatgaacttgcttaatgagtgtagcctttttcactccgatagtctcttcattgagccagctgctggtcagcttcatctgttcttgacctggatttatgatctgagcgttgacaaaattatctttgtttttttactctaggaaaatttctaaaaagaaaaaaaattctcatagctgtcttattaattttttttttctttttttttaaacagagtttcactcttgttgcccaggctaaagtgcaatggcgcgatctcagctcactgacacctctgtgctcccaggttcaagtgattctcctgcctcagcctcccaagtagctgggattacaggttcctgccaccacatctgactaattttttgtatttttagtagagacggggtttcaccatgttggccaggctggtctcaaactcctgacctcaggagatctgcccacctcggcctcccaaagtgttgggattacagccatgagccaccacacccggcccttattagatctttacaatgataaatatcattttgtttcaaattaatactcacttttgtgactttccatgacaactctgtattatcttcttagcagaaaggagcattgctttatttatttcctaataaagcgtttactatagtgcctcctgtgttgtgttttgttttgtttcagtgattgttttgcatctcacatatattatctcatctaagtcacatagaagcctcaaacttggacagaaccaagatgagtaaagtggcctgcatcgtgtcatgtagctaaggatggacagaattggctctaggctcagggtttctgatttcacctctactgatgtcacatttacagaattatactaaggacttagaaccgggaaggggtgcactcgaagttgttctctgacaatggaaacaccaattccacgcatttgcagaccattttctactaacaaagttctttccaaattcattcccctaaccaatagccacatcttaagagcaacaactcgttttaagagccctcgtgaatcatgtgaacattttatattctcagtctcttgtcaggcactggtgaagttctttaaatatttttgagcacccattgtgttcctgcctctgtcctgggactttggtgtgagaggctcatctagaaatacttgtttgttgaaataatggaattggcattctgtttgtcctcattcttctggtcacctaaataaatggtaatagaagattaagtcatggcccaaaaaacttaggccacatttcatttgcacccaaactttgagagataatttgttttcacatcaaaactttttattcctggcttactgtttttttattgtggtaaaatacacataaaatttacaattataatctttatttatttatttatttttgagatggaattttgctctgtcacccaggctggagtgcagtggcacgttctcagctcactgcaacctccgccttccaggttcgagcgatcctcctgcctcagcctcccgagtagctgggactacaggcatgtgccaccatgcctggttaattttttgtagttttagtagagatggggtttcactatgttggccagattggtctcaaataccttacctcgtgatccacctgcctcagcctctcaaagtgttgggattacaggtgtgagccaccgtgcccaaccacaattataatcatttttacatatacagttcagtggaagtaagtacactcatgttgttagacaaccatcatctgtctccagaaattttaaaaaattttttaaattatttattttttattttatcaacttttattttaagttctgggatacgtgtgcaggatgtgcaggtttgttacataggtaaatgtgccatggtggtttgctacacagatcaacccatcacccaagtattaagcccagaacccattaactgttcttcctgatgccctccctctcattgcctgcaacaggccccagtatgtgttgttctcccaccccaacgtttgtccatgtgttcccatcattcagctcccacttataaatgaaaacatgtcattttggttttctgttcctgtgttagtttgctgagaataacagcttctagctccatccatgtccctacaaaggacatgatccagttcctttttatggctgcatagtattccattgtgtacatgtatcatattttctttatccagtctactcttgatgggcatttgggttggttccatgtctttgctattgtgagtagtgctgcagtgaacatatgcatgcatgtatctttatgatagaatgatttctattcctttgggtatatatccagtaaagggattgctgaatcaaatggtatttctggggatggtgctatctggtccagctactatgcttttctatggtcttcacaactcacagaccaggagattccctcgggtgcctacaccaccacggccctgggcttcaagcacaaaactgggtggctgtttgggcaaacaccaagctagctgtaggagttttgtgtttttgttttgctttgttgttgttgttgttgttttcatatcctagtggtgcctggaatgccagcggcacaaaactgttcactaccctggaaaggggctgaagccagggagccgagtggtcttgttcagcagatcccacccccaaggcacccaacaagctaaaattcactggcttgaaattctcgctggcagcacagcagtctgaagtcgacctgggacactcgagcttggtgcggggaggggcgcccaccactgccaaagcttgagtaggcagttttcccctcacagtgtaaacaaagttgccgggaatttcgaactgggtgcggaaccacctcagcacagcaaagccactgtggccagactgccgctctatattcctcctgtctcgggaggtcatctctgaaagaaaggcagcagccccattcaggggcttacagataaaactcccatctccctgggacagagcacctgtggggtggggcagctgtgggcacagcttcagcagcagactcaaacgttcctgcctgcgggctctgaagagatcgactgttctcccagcacagcgctcaagctctgctaagggacagactgcctcctcaggtgggtctctgacccacatgcctcctgactcctcccagcaggggtcaacagacacctcatagcggagagctccggctggcatctggcaggtgccccctgggacaaagcttccagaggaaggagcaggcagcaatacccaggcaaacagggtctggagtggaccttcagcaaactccagcagacctgcagaagaggggcctgactgttagaaggaaaactaacaaacagaaagcaacagcatcaatatcaacaaaaaggatgcccacgcaaaaacccaatccaaaggttaccaatatcaaagaccaaaggtggataaatccaagaagatgaggaaaaaccagcacaagaaaaggctgaaaattccaaaaaccagaatgcctcttctcttccaaaggattacaactcctcaccagcaagggaacaaatctggacagagaataagtttgatgaattgacagaagtaggtttcagaaggtgggtaataacaaactcctctgagctaaaggtgcatgttctaacccaattcaaggaagccaagaacctttataaaatgttacaggaactgctaactagaataatcagtttagaaaagaacataaatgacctgatgtagctgaaaaacacagcacgagaattttgtgaagcatatacaagtatcaatgaccaaatggatcaagcagaagaaaggatatccgagattcaagatcaacttaatgaaataaagcgtgaagacaagattagagaaaaaagaataaaaaggaatgaacaaagcctccaagaaatatgggactatgtgaaaagaccaaacctatgtttgattggtgtacctgaaagtgatggggagaatggaaccgagttagaaaacacacttcaggatattatccaggagaacttccccaacctagcaagacaggccaacattcaaatttaggaaatacagagaacaccacaaagatactcctccagaagagcaaccccaagacacataattgtcagattcaccaaggttgaaatgaaggaaaaaatgttaagggcagccaaagagaaaggtcgggttacccacaaagggaagccaggaagcccatcagactaatagtggatctctctgcagataccctagaagccagaagagagtgggggccaatattcaacattcttaaataaaagaactttcaacccagaatctcatatccagccaaactaagcttcataagtaaaggagaaataaaatcctttacagacaagcaaatggtgaaggatattgtcaccaccagtcctgccttacaagagctcctgaaggaagcactaaatatggaaagaaaaaactggtaccagccactgcaaaaacataccaaattttaaagtccatcgacactatgaagaaactgcatcaactaatgggcaaaataaccagctggcatcataaagacaggatcaaattcacatataacaatgttaaccttaaaagtaaatgggctaaatgccccaattaaaagacgcacactggcaaattggataaagaattaagacctatcggtgtactgtattcatcagacctgtctcacatgcgaaaattgagacctatcggtatactgtattcatcagacccgtctcacatgcgaagacacacataggcccaaaataaagtgatggaggaatatttaccaagcaaatggaaagcaacaaaaaaaaagcaggtgttgcaatcctggcctctgataaaacagactttaaaccaacaaatatcaaaaaagacaaagggcattacataatggtaaaggaatcaatgcaacaagaagagaaacctaacctaagcatatatgcacccaatacaggagcacccggatttataaagcaagttcttagagccctacaaaaagacttagactcccacacaataataatgggagactggccgggcatggtgactcacacctgtaatcccagcgttttgggaggccaaggtgggtggatcatgaggtcaagagttcaagaccagcctggcgagcatggtgaaaccccgtctctactaaaaaatacaaaaatgagctgagcatggtggcacgcacctgtaatcccagctactggagagtctgaggcaggagaatcgcttgaacccaggaggcagaggttgcagtgagccaagatcatgccactgcactccagcctgggtgacagagcaagactccatcttaaaaaaaaaaatagtgagagactttaacaccccactgtcagtattcgacagatcaacaagacagaaaattaacaaagatattcaggacttgaactcagctctgggccaagcagacctagtagatatctacagaactctccaccccaaatcaacagaatatacatttttctcagcaccacatagcacttactctaaaattgaccacataattaaaaataaaacattcctcagcaaatgcaaaagaatggaaatcataacaaacagtctctgagatcacagtgcgatgaaattagaactcaggattaagaaactcactcaaggctgagtatggtggctcacatcagtaatcccagcactttgggaggccgaggcgggcagatcatgaggtcaggagatggagaccatcctggataacatggtgaaaccccgtctctactaaaaatacaaaaaaaaattaaccaggcattgtggcacgtgcctataatcccagctactcaggaggctgaggcaggagtgagcccaggaagtggaggttgcagtgaaccgagatcacaccaccgcactacagcctgggcgacagagcaagactccatctcaaaaaaaaaaaagtgggagactttaacaccccactgtcaatatcagacagaacaatgagacagaaaattaacaaggatattcaggacttgaaatcaactctggacctagtggacctaatagacatctacagaactctccacctgaaatcaacagaataaacattcttctcactacaacatagcactctaaatttcaccacataattggaagtaaaacagtctctcagatcacagtgcaatcaaattagaactaaggattaagaaactcactcaaggccaggcacggtggctcatgcctgtaatcccagcactttgggaggccgagtgggcagatcacaaggttaggagatcgagaccattctggctaacacggtgaagccgtgtctctacgaaaaatacaaaaaatttaggcaggcatggtggcaagcgcctgtaattccagctactcaggaggctgaggcaggagaatcgcttgaacccgggagacagaggttgcagtgagccaagatcacgctactgcactacagcctgggtgacagagcgagactctgtctcaaaaaaagaaagaaagaagaaagaagaaagaaagaaagaaagaaagaaagaaagaaagaaagaaagaaagaaagaaagaagaaagaaagaaagaaactcaaaaccacacaactacatggaaactgaacaacctgctcctgaatgactatgggtaaataacaaaattaaggtagaaataaataagttatttgaaaccaatgagaacaaagacacaatgtaccagaatctctgggacacagctaaagcagtgtttagagggaaatttatagcactaaatgcccacatgagaaagtgggaaagatctaaaatcgacaccctaacatcacaatttaaagaactagagaagcaacagcaaacaaattcaatagctcacaaaagacaagaaataactatgatcagagcagaactgaaggagatagagacacaaaaaatccttcaaaaaatcaatgaatccaggagctgatttcttgaaaagatttacaaaatagagcactagccagactaataaagaagaaaagagaggagactcaaagagacacaataaaaaatgataaacgggagattaccactgatcccacagaaatacaaactaccatcagagaatactataaacacctctactcaaataaactagaaaatctagaagaaatggattaattcctggacacacacaccctccgaagactaaaccaggaagaattcgaatccctaaatacaccaatagcaagttctgaaattgaggcagtaattaatagcctaccaaccaaaaaaaaagcccaggaccagacggattcacagccaaattctatcagaggcacaaagaggagctggtaccattccttctaaaactattccaaacaatagaaaaaggtagactcctccctaactcattttatgaggccagcatcattctaatgctaaaactgggcaaaaacataacaaaaaaagaaaatctcaagccaatatccctgatgaacattggtgcgaaaatcctctataaaatactggcaaaccgaatccagcaccacattacaaagcttatccaccacaatcaagtcgacttcatccctcggatgcaagactggttcaacataagcaaatcaataaatgtaatctatcacattaatagaaccaatgacaaaaaccacatgattatcttgatagatgaagaaaaggccttcaataaacttcgacacctcttcatgctaaaaacactcaataaactaggtattgatggaacgtatctcaaaataataagagctatttatgataaacccacagataatataatactgaatgggcaaaagctggaggcattccctttgaaaaccgacacaagacagggataccctctctcaccactgctattcaacatagtattggaagttctggccagagtaatcaggcaaaagaaagaaataaagcatactcaaataggaagagaggaagtcaaattgtctttgtttgcagatgacatgattctatatttagaaaaccccatcgtctcagcccaaaaactccttaagctgataagcaacttcagcaaaatctcaggatacaaaatcaatgtgcaaaaatcacaagcattcctatacaccaataatagacaagcagagagccaaatcataagtgaactcccattcacaattgctacaaagagaataaaatacttaggaatacaacttacacgagatgtgagggacctctttaaggagaactacaaaccactgctcaaggaaataaaagaggacacaaacaaatggaaaaacattccatggtaatggataggaagaatcaatatcatgaaaatgacaatactgcccaaagtaatttatatattcaatgctatccccatcaagctaccattgactttcttcacagaattagaaaaaactactttaaatttcatatggaaccaaaaaagagcctgcatagctgagacaatcctcagcaaaaagaacaaagctgaaggcatcatgctacctgacttcaaacaatactacaaggctacagtagccaaaatccatggtattagtaccaaaacagatgtatagacgaatggaacagaatagaaacctcagaaataacaccacatatctacaaccatctgatcttttacaaacctcacataaacaagcaatggggaaaggattccctatttaataaatggtgttgggaaaactggctagccatatgcagaaaactgaaagtggaccccttccttacactttatacaaaaattaactcaagatggattaaagacttaaacataagacctaaaaccataaaaaccctagaagaaaacctaggcagtaccattcaggacacaggcatgggcaaaacccctatcaaaaagtgggtgaaggatatgaacagacacttctcaaaagaagacatttagctaacaaacgtatgaaagaaagctcatcatcactggtcattagagaaatgtaaatcaaaaccacaatgagataccatctcacaccagttagaatggcaatcattaaaaaggcaagaaacaacagaggctggagaggatgtggagaaataggcacatttttacactgttggtgggactgtaaattagttcaaccactgtggaagacagtgtggcaattcctgaaggatctagaaccagaaataccatttgccccagcaatcccattactgagtatatacccaaatgattataaatcattctactataaaggcacatgcacacatatgtttattgcagcactgtttgcaatagcaaagacttggaaccaacacaaatgcccatcagtgatagactggataaagaaaatgtggcacatatacaccatggaatactatgtagccataaaaaaaatgagttcatgtcctttgcagggacatggatgaagctggaaaccattattctcagcaaactaacacaagaacagaaaaccaaacactgcatgttctcactcataagtgagagctgaacaatgagcacacatggacacagggaggggaacatcacacaccagggcctgtcagggagtagggggatacaggagggatagcattaagtgaaatacctaatgtagatgacgggttgatgggtgcagcaaaccaccatggcacgtgtatacttatgtaacaaatttgcacgttctgcacatgtaccccagaacttaaagtataatttttaaaaataggccatatcaaatagcctagatgtatagtaagctatatgatccaggtttaagtacactctacaatgttcacacaatgacaaaattacctagtggttcatttctcagaacctatccccattgttaaatgacaataacaggattcatgttttggtaaaaattaaaaacaaaatttaacaaaaaaaagagagcaaaaaggaaagataaaacacagcatgtgacaaaatatttataccatatccactcaataaatgataaactcctgatacatatatatcttatataagtttatagaaaataatctccacattatctatctatctatctatctatctatctatctatctatctatctatctatacactagtcagaacatacgtccaaaatctataaaacactaagaaattaacaaccatgaagaagtatgggtagaagacttgaacaggcatcttatgaaaaaggaaaaaggaacaaccaatgcctattagacattagtcatcaaataaatgcaaatctaaaacataaatacataccagtacaattcagaaggttcacaatattagggtcaagcaggagtcactactggttgtaaaatgttgaaacactgcttttttctttctactaatgctgattataagtgtttcctatgacgtggcaatttcactcctacatatattcccagagggaagaatttgaatgccacattcccatataagaaatattcattttcaaatccttaccagactagaataaatttggctagcttcgaagccattcattctttttaagatgcctgtgcataactttgctctgtttctttttgtgtaactttgaagttccaagggcaatctaatcttatttttctatccaaagccatccctctgtagggtctaaatagtgatatttcttacatgttagtgtaaactttcacttcattcatttctgccataatatttaagaaccgataatgatattctgtcatacacgtctacttatattctcaggaaactcagtgtttactttccactctcttcaaaaatctacatgtaaaactcagtgcaataggcctgttgttagagagctgcatgggctctcatgttttatgtgtttgttaatcaagtgataatctgataccactgtctcgttatttgggatccaccaatcacactttcccccaggttctcctcaatgaatttaactgatacctacatatgctgatgtaatttcctcctcctataatttgagttgcagattaaagacaattcctcactcacgttttctagattaacacaatattgttgtagaaatgactaagtacagatttcagataattgggctagacttcattgtttctgtcaaagtagataagaaagactacaactgggctacaagtatctcctgggagttccccccatggggtgtgtgtgtttgaaagggacccatgggatagtctagtgcccctgttgaaaaaagaactgttgatccccaagcccacactctgcaatagaactgctagagtatttcatggggcatgaaattgcctttagaaaaaccaatacagggggtcacatcaaggtcaaattgggcacagaagggtaggaattttgctatattcggaatttctttacttagagaaggtagaggaaatagagtaagaataggagaatatatttttggaatgcaatgatagtaaatatcctaaacaaaatataagtaaataaaatccaatggcatatacatatgatcgtaaccacatgaattgttttcagaaatgcaagactgggctaatatttgaacattaatcaacttttaaaataacacattttgggaagccgaggcaggtggatctcttgaggtcaggagtttgcgatcagctggccaacatggtgaaactctgtctctattaaaaatacaaaagttagctgggcatggtggtgtgctcccatagtcccagctactcaggaggctgaggcaagagaatctcttgaacccgggaggtggagattgcagtgagccaagattgtaccactgcactccagcctgggtgacgaagcaagactctgtctcaaaaaacatagaataaaacaacacttactgaaaaggtagaataatcataacattatttcagcttataaagaaaaagcattttgtaaatttcagtacattttcagttttctgtctctcagaaaataaggaatagaacaagacctgttgctatgatgaaatgaatctacaaaaaagacagaaagcatcgtaattaattgtgaaatactgagagttctcctttctatccaacgaatataaaaagatatacactacaccattctattagacattgccctggagggtctacccctggacaagggccaaaaaaaaagcaagattaaaaatactcttataaagcgaagaaaactattactattttttatgagtcatgactgcacatgtgcaattttctgtcacaccaaaaaaaaatacaaaaagtattagaattaacaagctaggaccagaactcagcttgatttgcccgaatctagagcacttacgtcacagagagtcccatgctggtaaacccttcagtcccaggcaaatcagggtaaatggcaacaccatcacagagacactcgatgctttctgaatcccagtggactcctttttctacccacctgctttggtctagctctgcattttggaatacattgtgccaaacaccctttccctagtgagtgtaatagaactggaagacacaggtggaatagtttgtagcgagaaagatgcttgttactcttgaatcagacttttgtgggtaaataggcttggtgccgggcacggattcaatgcatcactgtgaacataacagcatcacgcgactgcccacagacatttcccagtctacatacagtcaaccatgaggctggacagagagaactatctgcttcccggatcaccaggaactatcacatgaccagatgatggtcagagcaggaatgatgctggtgatgagactgccttccttttatctgaaacaaagtttttatgagtaattctcaattaagaaacagattaaacccttactttcaaaagattcataagatttcagaaacaacttcccctttgacaatcgcaaagggagtatggaaaacagtgtaaacaacaacaaggaaaagtcctgctgattggtggaaactttggaggccagatgtataaaaggtccagattgcaaggggtcatcagattctgggaaactcacctctgaacagaagcccaccctccacccctgacaccatgacccactgttgctccccttgctgtcagcctacctgctgcaggaccacctgctgcaggaccacctgctggaagcccaccactgtgaccacctgcagcagcacaccctgctgccagcccgcctgctgtgtgtccagctgctgccagccttgctgccgcccaacttgctgtcaaaacacctgctgtaggaccacctgctgccagcccacctgtgtgaccagctgctgccagccttcctgctgcagcacaccctgctgccagcccacctgctgtgggtccagctgctgtggccaaaccagctgtgggtccagctgtggccagagcagctcctgtgcacctgtgtactgcagaagaacctgctactaccccacgactgtctgcctgcctggttgcctaaaccagagctgtggctccaactgctgccagccctgctgccgcccagcctgctgtgagaccacctgctgcaggaccacttgcttccagcccacctgtgtgtccagctgctgccagccttcttgctgctgatcacgttccaagagaaccaccatcctcacacaacaaatttctgctcaactgactcatcttttgggggactaatttaatttgctgctgacagccaccatgctctcacccaaatttttatgaattctctacatgtttaaaatcttggaaatctgcttgagggagggcagaatacttcatcctgattctctttttccttacaccttgtggatcatgtgccagcttcatctgttctcaagtttgagtcatggtctcagctttgactctaaagtcaagagcttcattccctgcttctaaggaatttaggtttctgcaactgatcgatgatctttgcaatcttttttttgttttcaatatcctcctcatcgttcttgtatccttctttcttcttttcatgataaatttgtgttgtgtccctggtagcagaaatccttacctatatgtttctgaataaattctgaaccatcctcatctcatatagtgttttgttttatttgaaagcactcctgatatgggatttacacacatatcacataccatagttattatccaatttgattctcaaaacaggtggtcatgcattattaccttcatttttcacctgaaaaaaaattaatatgtgatgttatgtagctaataaaggacagattctgatccaagctgaggtcctctctttctgcccaaggacacttacatttaactctcaacatagtagaaatgacattggaagtcagcactagcaagacatgcacttgagtttatttaacaatgagagaaataatctctcatatttgcaaataatatttttattcacaaaaaaatcccaaattattttttcccacacctcagtgagcaacagctgcatgacatggcagcagggattgcatttaatggctgccctgaatgcagggatctttttgtctcagcctctgaccagccaatcattcaattcatccgcatcaaaaagatgcttgagaattcattatatcatcataagagagagtctcatctgaagtgacttattctcagtatgatgtaaataaaattcttacacagcctccccctcctgaatacctgttgacaaagtcaatgaaactaagttattccttgtaaaatacagaccacaccttatgccacattaagacaatttgtcccctaatcgaaatgttatgaggaaaattaagtaaggaattaagctgggaattgagaaagtacgcaatgggtatgtaagacgtggcacaatccataatctctaaaccaaggaagggaatgaaagaaccttctgaattttgtaagaccaatatgaggcatctaaagaaactgaaaacggtgtttgcagggaaatcagaagaatgtaagaaaggagcaaagtagaacgtgtgcattcatagaagtcatgatagacagaggttggtgcttttggttctgaactggtgcaagctaagcattcactcagggaaagatagattgatactggctctgagagaaatacaaagtttggggacctgggtcaccttcttgcgacctcctaccagcatgggagtggtagaaatacctctgatgagctaacaatgtagatttccatgacagatgccaacttctgagactgtgaatctagaatgctctgaagacttggctgagggatgaaggccacttactgtgatcatcgttcagggatgaagtaaaggacatgaaaactaggacattccttttgactagcatcagttatgaaaggtgaataagttcagcatgtctactgtacagtagtgtcactatagttgtaaacactgtatcatacacctgaaatttgccaagaagttagatcttatatgttcacaccacaaaaataaaaaggaaatggtaactacgtgggctaataaacatgttattcacaatggatatatatattagagcatcatcttccatacctgaaatagacacaatttttatttgtcaattacacctcaatacagctcgaaaaagtatttggttgatctggttaattattacaaaaatattcttatcttcaacattaaaattagaaattttctgaacaaaaacactaattctgggctgcctgctataggagacatattggctaaatgctttgtgtacactattattaattctttttttttttttttgagatggagtcttgctctgtcacccaggctggggtgcagtggtacaatcttgactcactgcaagctctgcctccctggttcatgccattctcctgcctcagcctctcgagtagctgggactataagcacccgccaccacgcccggctaattttatgtatttttagtagagacggggtttcaacattttagccaggatggtctcgatctcctgaccttgtgatccgcccgcctcggcctcccaaaatgcttggattacaggcgtgagccactgcacccggctattattaattctttaacaaactttcaaaacaggtattaatgttccctttgtagagatgaaaaaattgaggctgagagagttagtgtattgtcatagattagtttctcccagaagagactctgaggaaagcattccagtgaaactagtttattcggaagtgcagatcacactggtagggattggggaagtgatacagaaaagggtacactatcaagtcagtatcacagtcaccaactaaagcttaaactaaagggaaaactatcagaaatgacaaaaaaacacacagctagagttatcctacttcaggaatgaggaagctagagtctttataaatcagctctccagaatcattggttgagagtttttctctgtgttgcattcacaggtgacatgacttcttacagcagcaatacaagagctcttaggcacagagatgcagattctaacagatggaaattagtccaagcacactaagatctaatatatatgggtgcagtcatgaaaacttatctatgatctacaattagctccactcaagtaaaacctttgctacttaaatgtgatggacaggcacaagctctagaagaaggaagaagaggaggtgagaaagaggagtaagagaagggacagaagatgagtggaggacaaaagaaagaaagagagagagagaaagagaaaaagaaggaaggaagggagagagagagaaagaaagaaagagagaaagaaagaaagaagaaagaaagaaagagaaagaaagaaagagaaagaaagaaagaagaagaaaggaaggaagaaaggaaggaagaggaaggagagagaagaaggaaatgaaaagaaaggagaggaagtgagatgtaaaatgaaggccaatgaaataagctacacttactgctgctatagtacagtgcacctgagattcacagtctccgtttattaccaccagttctattctcccttcaccgctggccagcactcttcttggtctggataactgcctgataactgccttgataacttccttcctaaattgtctgagcctctagttactataccactgtccactgtgattgctgttcttaccgatttgtagttatcactggacatggacacactatgagattctccagtgttatgggttaatttgtgtcccccaaaactcatattcaaatagaatcatttaaagtgttatgtgataaggcaaggtcatattggaaacaattaggcctctgattaaatatgactgatgtctatataaaagggggaaattcagagacagcatgcatataacagaaaaattatatcaaacacacatggaaatgatagacatcaacaagtcaaggagagagacctggaacatgtacttccctcacaggcttcagatgaaaacaacattgccaaaaccttaatttctgaactgtgaaaagataaatttaagccacttggtttacagtaatttattatggcagtgctggtaagttaatacacttactaagtatcctgagctatagatatattctgctacactatatggcttaaagataattacccctcaccaaatagtaactcctttctctgtctgctgctctgctgacgggaagagtccaaaatgactaggcgataacgattccttttgattataacaaagaaacagagaagcaaatactataatttttattcacatggaaattttaaaaagccaaagtcatctactggattataacttgatagagtgattagctgtttggaaatgagtaagcggatataattgggagagaatggcattaatttctatttcctaacctggtaatggggacatagatgtatttacaatgtaatactatatcaggttggaaattaataatttgcattcttctcaagtgaatgatatacctagacaatgttttcaacatgttagaactccacgatgaatcaggtgtcatctcaactcatctaatcccttcattgaaaagaaatagaagaaattacttctacttacttcttcttctagttactgctagtaactaggtttagggctagagccacagcacatgctggttggcctgaatttcaacgcttacttctagttactgctagtaactaggtttagggctagagccagagcacatgctggttggcctgaatctcaagaagttacgtgatagaaagtcctccattctcatcccggaaatccccacactcccagacaagtcagaatgaatggtcgtcctagggcatacattgcttgatgctgtctaaatctcagcagatttctctgcatccacctgttctcgatctgctctgtcgcatggaacacactgtgcagtcaccgtcttcccaagtgacattcaaagaactgaaagacacagatgatgtgggtggcacaaagagatgcctgttagtcttgagtcagaatttggtgggtgaatagtcttgggcccaggcatggattcattttgtcactgtaaatatatcagcatcatgcttctccccacagacacttccaagtctatatacagccaaacatgaggctggccagagagaacttcctgagccccccggatcaacaggaactgtcacatgaccagatgatggtcagagcaggaatgatgctgatgatgagacgggcttccttttatctgaaacaaactttctatgagtaactcacaattaagaaacagattaaacccttagtttaaaaggttcataagatttcagtaacaacttcccctttgacaatcccaaatggactgtggaaaacaatgtaaacagcaacaaggaaaagtcctgctgattggtggaaactttggaggccaggtgtataaaaggtccagattgcaaggggtcatcagattttgggaaactcacctcttaacagaagcccaccctccatccctgacaccatgacccactgttgctccccttgctgtcagcctacctgctgcaggaccacctgctggcagcccaccactgtgaccacctgcagcagcacaccctgctgtcagccctcctgctgtgtttccagctgctgccagccttgctgccacccaacttgctgtcaaaacacctgctgtaggaccacctgctgccagcccatctgtgtgaccagctgctgccagccttcctgctgtagcacaccctgctgccagcccacatgctgtgggtccagctgtggtcagagcagctcctgtgcacctgtgtactgcagaagaacctgctaccaccccacaagtgtttgtctgcctggttgcctaaaccagagctgtggctccaactgctgccagccctgctgccgcccagcctgctgtgagaccacctgctgcaggaccacttgtttccagcccacctgtgtgtacagctgctgccagccttcttgctgctaatcaactcccaagagaactaccatcctcacacaacaaccttcagctcaactgacttgtcttttgagggactaatttactttgctgctgacagccaccatgctctcacccaaatttttatgaattctctacatgtttaaaatcttgggaatctgcttgagggagggcagaatacttcatcctcattccctctttccttacaccttgtggatcatgtgccagcttcgtctgttcttaatttggagtcatgatctcagctttgtctcaaaaatcaagagcttcattctttgcttctaaggaatttaggtttctgcaactgatcaatcatctttgcaattatattttcattttaaatatccttctcatggttcttgtatccttctttcttcttttcacgataactttgggttatgtctctggtagcagagattcttacctatatgtttctgaataaactctgaaccatcttcatctcatatagtgttttgttttatttgaaagcattcctgatatgggatttacacacatatcacataccataggtattatccaatttgattctcaaaacagatggtcgtgtattattaactccattttttcagctgagaacaatttaatgtgtgatgttatgtagctagtaaagggcagactctggtcaaaggtgaggtcctctctttctgcccaaggacacttacgtttaactcccaatatagtagaaaagacactggaagtcagcactagcaagacatgtacttgagtttatttaacaatgagaggaataatctgacatatttgcagataacacttttgttcacacacaaaaaaatcccaaagtagttccccacacctcagtgagcaaaggctgcatgatatgcatttaatggctgccctgaatgcagagatctttttgtctgagcctctgaccagccattcattcaattcatctgcatcaaaaaatgcttgagaatttattgtggactcaggagacggagcctcatctgaagaaacttattctcagtgtgatgtaaataaaattcttatacagcatcggtctcctgaataccaattgacaaagtaaatgaaactaagttattcattgtaaaatacagaccatacgttatgccacgttaagacaatttgtcccctacttgaagtgttatgagtaaaattatgtaagaacaaagctgggaattgagaaactatgcaatgggcatgtaagacttggcacaacccataatctctgagctaaggaagggaataaaaacaaccttccacattttgtgaggccaatatgaagaatctaaagaaatgaaaaacttctttttccacggaaatcagaagaatgtaagaaaggagcaaggtagaacttgtgcattcatagaagacataatagacagaggttggtgcttcgggtcctgaactgatgtaagataaccattcactcatgaaaggattgattgatgctggctctgagagaaattgaaaagtcggggacctggggcaccttcttggggcctcctaccagcaggggagtggtagaaatacctctgatgagctaaaaatgtagatttccatgacagatgccaacttccgagactgtgaatctagaatgctctgaagacttggctaagagacaacagccacttactgtcatcatcgttcagggatgaagtaaaggagatgaaaactaggacattctctttgactagcatcagttatgaaagatgaataagttcagtaggtctaatgtacagtaatatgactatagttaaaaacactttatcatatacctgaaatttactgagaaggtagatcttaaatattcacaccagaaaaataaaaaggaaatggtaactaagtgacctaataaatatgttattcacaatcaatatatatatcagagcatcaccttctatacctgaaatgtacacaatttttgtttgtcaattatacctcaatacagctagaaaaaaacgtatttagttgatctatttaattaatacaaaaatattcttatcttcaacataaaacttgggaattttctgaacaaaaaacactaattctgtgttgcctgctctatgatgggtactggataaatgctttgtgtacattattattaactatttaacaaactttcaaaataggtattaatgttcctcttgtagagatgagaaatttgaggctgagttaacgtatagtcatagatgagtttctcccagaagagactctgaaaaaaaattccagtgaaactagtttactgggaagtgcagatcatactggtagggactggggaagtgatacagaaaagggtacactattaagtcagtttcacagtcaccaactaaagcttaaactaaagtgaaaattatcagaaatgatgaaaaacacatagctggtattatcctacttcaggaatgaggaagctagagtctttataaatcagctctccagaatcattggttgagtgtttttctctgtattgcattcacaggtggcatgactttctacagctgcaatacaagagcccttaggcacagagatgcagattttgacagatagaaattgatccaagcacactaacatgcaagatatacgggtgcagtcatgaaaacttgtctacgatctacaactagctccactcaagtcaaatatttgctacttaaatagaatggacagccacaagctctaggagaaagaagaagaggaagagaggaagcagaggaagagaagggacagaagatgagaggagaaggaaagagaaaagaaggaaagaaaaacagaaagacagagagaaggaaggaaggaaggacggacaggagggagggaaaagagggagcagggaggaaccgagggagggaaaggaaggaaggaaggaaggaaggaaggaaggaaggaaggaaggaaggaaggaaggaaagaaggaaggaaggaaggaaagagatcgaaagaaagaaagaaagaaagaaaaaagaaagaaagaagaaagaaagaaagaatagagagagagagaagggaagggaagggagggaggcaggaagggagaaaaaggaaggaaggaaggaaaagaaagaaagaaagaagaaggaaaggaaaagaaaggagaggaagtgagatataaaatgaaggccaattaaataatctacacttacttctgctataatacagtgcacctaagtttcataaactccgttaattaccaagagttctattctcccttcacccctggccagcactctttttggtctagataactgctgatagagtagctcagagcatccttcctgaagggtctgagcccctggttactataccattgtccaccgtgattgctgtttttattcatttgtggttatcactgggcatggacacactatgagattctgcagtgttatgggttcatttgcgtccctcaaaatccatatacaaatagaaccatctaaaatgttatctgataagacaaggtcatattggaaacaattaggcctctgattaaatatgactgtgtctattcacaagggagaaattcagagacagtatggatataatagaaaaattatgtcaaacacacttggagatgatagacttcgacacgtcagggagggagacctggaacagatacttccctcgcagtcttcagatgaaaacaacattgccaacaccttaatttcagaaaagaggccttcagaactttgataaataaatttaagccactttttttcagtaattcatcagggcagtgctagtaaattaatatactcagtaaatctcctgagctatagatatattctgctacactatatggcttgagggtaattatccctcaccaaatagtaactactttctctgtctgctgctttgcttatatgaagagtccaaaatgactaggcgataaagattacttttgtttatgccaaagaaatagagaagcaaatactatactttttattcacatgaaaattttaaaaagccaaaagttacctacaggattacaactgatagagtgattagctgtctttgggaaagagtaagagcatataattgggagagaatggaattaatttctatttcctaacatagatgtaatgggacataaatgtatttacaatataatactatatcaagttgaaaattaatagtttgcattttctcaaatgaatggtatacctagaaaatgttttaaacatgttagaactccatgatgaatcaggcatcatctcaactcatctaattccttcattaaaaagaaatagagagagaagacatgatgcttactgtgctggtaactgggttgcagctagagccagagcacatgctggttggcctgaatctcaagcagttatgtcatagagagtcctacattctcgtcctggaatcgccacactcacagacaagtcagaatgaatggtcactcagggcatagtttgcttgatgttgtctaaatcccagtgaatttctctgcatccccctgctctcgatctgctctgccacatggaacacactgtgacagacaccctcttcccaagtgacgttcaaataacggaaaggcacaggtggtgagggtggtacagagagatgcctgttagtcttgagtcagaatttggtgggtgactagccttgggcccaggcatggattcattttgtcactgtaaatatatcagcatcatgcttctccccacagacacttcccagtctatatacagccaaacatgaggctggccagagagcttcctgagcctcccagatcaacaggaactatcacatgactagatgatggtcagaataggaatgatgctgatgatgagacgggcttccttttatctcaaacaaagtgtctatgagtaattcacaattaagaaacagattaaaccttaatctgtttaaccttaaggaaacaactaccctttgagaatcacaaacggactgtggaaaacaagataaacagcaacaaggaaaagtcctgctgattggtggaaactttggaggccaggtgtataaaaggtccagaatgcaaggggtcatcagattctgggaaactcacctctgaacagaactccaccctctacccctgacaccatgacccactgttgttccccttgctgtcagcctacgtgctgcaggaccacctgctggaagcccaccactgtgaccacctgcagcagcacaccctgctgccagccctcctgctgtgtgtccagctgctgccagccttgctgccgcccaacttgctgtcaaaacacctgctgccagcccatctgtgtgaccagctgctgccagccttcctgctgcagcacaccctgctgtcagcccacctgctgtggccaaaccagctgtgggtccagctgtggtcagagcagctcctgtgcacctgtgtactgcagaagaacctgctaccaccccacgactgtctgcctgcctggttgcctaaaccagagctgtggctccaactgctgccagccctgctgccgcccagcctgctgtgagaccacctgctgcaggaccacttgcttccagcccacctgtgtgtccagctgctgccagccttcttgctgctgatcacgttccaagagaaccaccatcctcacacaacaaatttctgctcaactgactcatcttttgggggactaatttaatttgctgctgacagccaccatgctctcacccaaatttttatgaattctctacatgtttaaaatcttggaaatctgcttgagggagggcagaatacttcatcctgattctctttttccttacaccttgtggatcatgtgccagcttcatctgttctcaagtttgagtcatggtctcagctttgactctaaagtcaagagcttcattccctgcttctaaggaatttaggtttctgcaactgatcgatgatctttgcaatcttttttttgttttcaatatcctcctcatcgttcttgtatccttctttcttcttttcatgataaatttgtgttgtgtccctggtagcagaaatccttacctatatgtttctgaataaattctgaaccatcctcatctcatatagtgttttgttttatttgaaagcactcctgatatgggatttacacacatatcacataccatagttattatccaatttgattctcaaaacaggtggtcatgcattattaccttcatttttcacctgaaaaaaaattaatatgtgatgttatgtagctaataaaggacagattctgatccaagctgaggtcctctctttctgcccaaggacacttacatttaactctcaacatagtagaaatgacattggaagtcagcactagcaagacatgcacttgagtttatttaacaatgagaggaatgatctcttatatttgcagataacatttttgttcacaaaaaagttttcccaaataagtttcccacacctcagtgagcaacagctgcatgatatggcagcagggactgcatttaatggctgccctgaaagcagggatctctttttgtctcatcctctgaccagtcattcattcaattcatctgcatcaaaaaatgcttgagaattcattgtggactcatgagagagtctcatctgaaggaacttattctcgatatcatgtaaataaaattgttatatggcctccatctcctgaacacctattgacgaagtaaatgaaactaagttattccttgtaaaacacagactgtaccttatgccacattaagaaaatttgtcccataattgagacgttatgaggaaaattaagtaagaacaaagctgggaattgagaaagtgtgcaatgggcatgtaagacttggcacaatccattatctctatgagaaggaagggaatgaaacaaccttctgcagtttttgaggataatatgaaccatctaaagaaacgaaaaacttgtgttttcagggaaatcaacataatgtaagaaaggagcaaagtagaacttctgcattcatagaagtcatgatagggggaagttccaaggtggctgaatgggaacagctccagtctacagctcccagcatgagtgacgcagaagatggttgatttctgcatttccaactgaggtaccgggttcatctcactggggcttgttggacagtgggtgcaggacagtgggtgcagcccactgagcatgagccaaagcagggcgaggcattgcctcacccaggaattgcaaggagtcgggggaagctgtgacagatggcacctggaaaactgggtcactcacaccctaatactgcccttttccaatggtcttacaaacggcacaccaggagattatgtcccgtgcctggctcagagagcccacgcccacagagcctctctcattgttagcacagcagtctgagatcgaactgcaaggtggcagtgaggctgggggaggggcgcctgccatggctgaggcttgagtagataaagtggccaggaagctcgaactgggtggagcccaccacagctcaaggaggcctgcctgccactgtagactccacctctggggcagggcatagccaaacaaaaggcagcagaaacctctgcagacttaaatgtcccgtctgacagctttgaagagagtagtggttctcctagcacacagtttgagatctgagaacagacagactgcctcctcaagtgggtccctgacccccaagtagcctaactgggagacaccctccagtaggggcagtctgagacctcacatggccagatacccctctgagatgaagctccagagaaatgatcaggcagcaacatttactgttcagcaatattcgctgttctgcagcctccgctgccgatacccaggcaaacagggtctggagtggaccttcagcaaactccaacagacctgcagctgagggtcctgactgttagaaggaaaactaacaaacagaaaggacatccacaccaaaaccccatctgtatgtcaccatcatcaaagaccaaaggtagataaaatcacaaagatggggagaaacagagcagaaaagctgaaaattctaaaaatcaggtgcctctcaccttccagaggagcacagctccttgccagcaacggaacaaagctggatggagaatgactttgatgagttgagagaagaaggcttcagatgaacaaacttctccaagctaaaagaggaagttcgaacccattgcaaagaagctaaaaaccttgaaaaaagattagacaaatggctaactaaaataaccagtgtagagaagtccttaaatgacctgatggagctgaaaaccatggcatgagaactacgtgacgaatgcacaagcttcagtagcaaattcaatcaactggaagaaagggtatcagtgattgaagatcacaggaatgaaatgaagagagaagagaagtttagagaaaaaagagtaaaaagaaaggaacaaagcctccaagaaatatgggactatctgaaaagaccaaatctacatctgattggtgtacctgaaagtgacggggagaatgaaaccgagttggaaaacactctgcaggatattatcgaggagaacttccccaacctagcaagacaggcgaatattcaaattcaggaaatacagagaacaccacaaagatactcctcgagaagagcaactccaagacacataattgtcagattcaccaaagttgaaatgaaggaaaaaatgttaagggcagccagagagaaacgtcgggttacccacaaagggaagcccatcagactaacagcagatctctcggcagaaactctacaagccagaagagagtgggggccaatattcaacattcttaaagaaaagaattttcaacccagaatttcatatccagccaaactaagcttcataagtgaaggagaaataaaatactttacagacaggcaaatgctgagagattttgtcaccaccaggcctgccttacaagagctcctgaaggaagcactaaacatagaaaggaacaactggtaccagccactgcaaaaacatgccaaattgtaaaggctgtcaatgctaggaagaaactgcatcaactaacgagcaaaataaccagctaacatcataatgacaggatcaaattcacacataacaatattaaccttaagtgtaaatgggctaaatgctccagttgaaagacacagactggcaaattggataaagagtcaagacccatcagtgtgctgtattcaggagacccatctcccatacagagacacacatatgctcaaaataaagggatggaggaagatctaccaagcaaatggaaaaaaaaaaggagggtttgcaattgtagtctgtgataaaactgactttaaatcaacaaagataaaaagagacaaagaaggccattgcataatggtaaagggatcaactcaacaagaatagctaactatcctaaatatataagcacccaatacaggagcacccagattcataaagcaagtccttagagacctacaaagagacttagactcccacacaataataatgggagaatgtaacaccccactgtcaacattagacagatcaacgagacaggaagttaacaaggatatctagaaattgaactcagctctacgccaaacggacctcatagacatctacagagctctccaccccaaatcaacagaatatacattcttctcagcaccacatcacacttattccaaaattgaccacatagttggaagtaaagcactcctcagcaaatgtaagagaagagaaattataacaaactgtctctcagacaacggtgcaatcaaactagaactgaggatttagaaactcactcaaaaccactcagttacatgaaaactgaacaacctgctcctgaatgactactgggtacataacaaaatgaaggcagaaataaagatattctttgaaacaaatgagaacaaagacacaacataccagaatctctgggacacctttaaagcagtgtgtagagggaaatttatagcactaaatgcccacaagacaaagcaggaaagatctaaaattgacaccctaacatcacaattaaaagaactagagaagcaagagcaatcacattcaaaagctagcagaaggcaagaaataactaagatcagagcagaactgaaggaaatagagacatgaaaaacccttcaaaaaatcaatgaatccagtcgctggttttttgaaaagatcaacaaaattgatagaccgttagcaagactaataaagaagaaaagagagaagaatcaaatagacgcaataaaaaatgataaatgggatatcaccaccaatcccacagaaatacagactaccatcagagaatactataaacacctctatgcaaataaactagaaaatcttgaagaaatgaataaagactaaaccaggaagaagctgaatccctgaatagaccaataacaggctctgaaattgaggcaataattaatagcctaccaaccaaaaaaaaagtccaggagcagacggattcacagccaaattctaccagaggtacaaggaggagctggtaccatttcttctgaaactattataatcaatagaaaaagagggactcctccctaactcattttatgaggccagcatcatcctgataccaaagcctggcagagacacaacaaaaaaagagaattttcgaccaatatccctgatgaacattgatgcaaaaatcctcattaaaatactggcaaactgaattcagcagcacatcaaaaagctgatccaacatgataaagtgggcttcatccctgggatgcaaggctggttcaacatatgcaaatcaataaacataatccagcatataagcagaaccaaagacaaaaccacgtgatatctcaatagatgcagaaaaggcctttgacaaaattcaacaactcctcatgctaaaaactctcaataaattaggtattgatgggacgatctcaaaataataagagctatttatgacaaacccacagccaatatcatactgaatgggcaaaaactggaagcattccctttgaaaaccggcacaagacagggatgccctctctcaccactcctattcaacagtgttggaagttctggccagggcaatcaggcaggagaaagaaataaatggtattcaattaggaaaagaggaagtcaaattgtccctgtttgcaggtgacatgattgtatatttagaaaaccccatcatctcagcccaaaatctccttaagctgataagcaacttcagcaaagtctcaggatataaaatcaaagtgcaaaaatcacaagcattgttatacaccaataacagacaaagagagagccaaatcatgaaggaactcccattcacaattgcttcaaagagaataaaatacctaggaatccaacttacaagggacgtgaaggacctcttcaaggagaactacaaacctctgctcaatgaaataaaagaggacacaaacaaatggaagaacatcccatgctcatggataggaagaatcaatatcatgaaaatggccatactgcccagggtaattcatagattcaatgccattcccattaagctaccaatgactttcttcacagaattggaaaaaactactttaaagttcatatggaaccaaaaaagggcctgcattgccaagacactcctaagccaaaagaacaaagctggagtcatcatgctacctaacttaaaactatactaaaaggctatagtaacaaaaacatcatggtactggtaccaaaacagaggtatagaccaatggaacagaacagagccctcagaaataataccacacatctacaaccatctgatctttgacaaacctgacaaaagcaagaaatggggaaaggattccctatttaataaatggtgctgggaaaactggctagtcatacgtagaaagctgaaactggatcccttccttacaccttatacaaaaattaatttaagatggattaaagacttaaatgttagacctaaaaccataaaaaccctagaagaaaacctaggcaataccattcaggacataggcatgggcaaggacttcatgtctaaaacaccaaaagcaatggcaataaaagccaaaattgacaaatgggatctaattaaactaaagaacttctgcacagcaaaagaaactaccatcagagtgaacaggcagcctacagaatgggagaaaatttttgaaatctactcatctgacaaagggcaaatatccagaatctacaaagaactcaaacaaatttacaagaaaaaaacaaaccatcccatcaaaaactggatgaaggatataaacagacacttctcaaaagaagacatttatgcagccaaaagacacatgaaaaaatgctcatcatcactggccatcagagaaatgcaaatcaaaaccacaatgagataccatctcacaccagttagaatggctatcattaaaaagtcaggaaacaacaggtgctggagaggatgtggagaaataggaacacttttacactgttggtgggactgtaaactagtttaaccattgtggaagacggtgtggtgattcctcaaggatctacaactagaaataccatttgacccagccatcccattactgggtatatacccaaaggattataaatcatgctgctataaagacacatgcacacgtatgtttattgcagcactattcacaatagcaaagacttggaaccaacccaaatgtccatcaatgatagatgggattaagaaaatgtgacacatatacaccacagaatactatgcagccataaaaaaggatgagttcatgtcctttgtagggacatggatgaagctggaaaccatcattctcagcaaactatcgcaaggacaaaaaaccaaacaccacacattctcagtcataggtggcaattgaacaatgagaaccgttggacgcaggaaggggaacatcacacaccggggcctattatggggtgaggggagtggggagggatagcattaggagatatatctaatgtaaataacgagttaatgggtgcagcacaccattatggtgcacgtatacatatgtaacaaacctgcacattgtgcacatgtaccctagaacttaaagtaaaaaaaaaaaaaaaagaaagaaaaaaaaaagaaacagaagtcatgatagacagaggtttttgcttcgggtcctgaactgattcaagctaagcattcacccacggaaggttgattgatactggatctgtgagaaatacaaagattggggacctaggtcaccttcttggggcctcctacaagcaggggagtggtagaaatacctctgatgagctaacaatgtagatttccatgacagatgccacttctgagactgtgaatctagaatgctctgaagacttggctaagagacaacagccacttactgtcatcatcgttcagggatgaagtaaaggagatgaaaactaggacattctctttgactagcatcagttatgaaagatgaataagttcagtaggtctaatgtacagtaatatgactatagttaaaaacactttatcatatacctgaaatttactgagaaggtagatcttaaatgttcacaccagaaaaataaaaaggaaatggtaactaagtgacctaataaatatgttattcacaatcaatatatatatcagagcatcaccttctatacctgaaatgtacacaatttttgtttgtcaattatacctcaatacagctagaaaaaaacgtatttagttgatctatttaattattacaaaaatattcttatcttcaacataaaacttgggaattttctgaacaaaaaacactaattctgtgttgcctgctctatgatgggtactggataaatgctttgtgtacattattattaactatttaacaaactttcaaaataggtattaatgttccccttgtagagatgagaaatttgaggctgagagagttaacgtattgtcatagattagtttctcccagaagagactttgaagaaaatattccagggaaactagtttactgagaagtgcagatcacaccggtagggactggggaagtgatacagaagaaggcacactattaagtcagtatcacagtcaccaactaaagcttaaactaaagggaaaactatcagaaatgatgaaaaacacacagctagaattaccctacttcaggaatgaggaagctaaagtctttataaatcagctctccagaatcattggttgagtgtttttctctgtgttgcattcacaggtggcatgactttctacagctgcaatacaagagcccttaggcacagagatgcagattttgacagatggaaattgatccaagcacagtaacatccaagatatatgggtgcagtcatgaaaacttgtctacaatctacaattagctccactcaagtcaaatatttgctacttaaataggatgggcagccacaacctctaggagaaggaagaagaggaagagaggaagcagaggaagagaagggacagaagatgagaggagaaggaaagagaaaagaaggaaagaaaaacagaaagacagagagaaggaaggaaggaaagaaggaaggaaggaaggacaggaaggagggagggagggaaaggagggagcggggaggaactgagggaggggaaggaaggaaggaaggaaaaaagaaagaaagaaagataaaaagaaagaaagaaagagaaagaaagaaagagagagaaagggagagagaagggaagggaagggagggaggaagggaggaaaaaaggaaggaaggaaggaaaagaaagaaagaaaagaaagaaagaaagaaagaagaaagaggaaggaaaggaaaagaaaggagaggaagtgagatataaaacgaaggccaattaaataatctacacttacttctgctataatacagtgcacctaagtttcataaactccgttaattaccaagagttctattctcccttcacccctggccagcactcttgttggtctagataactgctgatagagtagctcagagcatccttcctgaagggtctgagcccctggttactataccattgtccaccgtgattgttgtttttactcatttgtggttatcactaggcatggacacactgtgagattctgcagtgttatgggttcatttgcgtccctcaaaattcatattcaaatagaatcatctaaagtgttatctgataagacaaggtcatattggaaacaattaggcctctgattaaatatgactgtgtctattcacaagggagaaattcagagacagtatggatataatagaaaaattatgtcaaacacacttggagatgatagactttgacacgtcagggagagagacgtggaacagatacttccctcgcagtcttcagatgaaaacaacattgccaacaccttaatttcagaaaagaggccttcagaactttgataaataaatttaagccactttttttcagtaattcatcagggcagtgctagtaaattaatatactcagtaaatctcctgagctatagatatattctgctacactatatggcttgagggtaattatccctcaccaaatagtaactactttctctgtctgctgctttgcttatatgaagagtccaaaatgactaggcgataaagattacttttgtttatgccaaagaaatagagaagcaaatactatactttttattcacatgaaaactttaaaaaaccaaaaattacctacaggattacaactgatagagtgattagctgtctttgggaatgagtaagagcatataattgggagagaatggaattaatttctatttcctaacatagatgtaatggggacacagatgtatttacaatataatactatatcaagttgaaaattaataatttgcattcttctcaaatgaatggtatacctagaaaatgttttaaacatgttagaactccatgatgaatcaggcatcatctcaactcatctaattccttcattaaaaagaaatagagagagagagagaagacatgctgcttactgtgctagtaaccgggttgcgactagagccacagcacatgctggttggcctgaatctcaagcatttatgccatagagagtcctacattctcattctggaatcgccacgctcacagacaagtcagaatgaatggtcactcagggcatagattacttgatgctgtctaaatcccagtggatttatctgcatccacctgctctcgatctgctctgccacatggaacacactgtgacaaacaccctcttcccaagtgatgttcaaagaactgaaagacaggtggtgtgggttgcacagagagatgcctgctagtcttgagtcagaatttggtgggtgactagtcttgggcccaggcatggattcattttgtcactgtaaatatatcagcatcatgcttctccccacagacacttcccagtctacatacagccaaacatgaggctggccagagagaacttcctgagcctcccagatcaacaggaactatcacatgaccagatgatggtcagaacaggaatgatgctgatgatgagattgccttccttttatctgaaacaaagtgtctatgagtaattcacaattaagaaacagattaaaccttaatctgtttaaccttaaggaaacaactaccctttgagaatcacaaacggactgggaaaacaatgtaaacggaaacaaggaaaagtcctgctgattggtggaaactttggaggccaggtgtataaaaggtccagattgcaaggggtcatcagattctgggaaactcacctctgaacagaagcccaccctctacccctgacaccatgacccactgttgctccccttgctgtcagcctacatgctgcaggaccacctgctgcaggaccacctgctggaagcccaccactgtgaccacctgcagcagcacaccctgctgccagccctcctgctgtgtttccagctgctgccagccttgctgccgcccaacttgctgtcaaaacacctgctgccagcccacctgtgtgaccagctgctgccagccttcctgctgcagcacaccctgctgccagcccacctgctgtgggtccagctgtgaccagagcagctcctgtgcacctgtgtactgcagaagaacctgctactaccccacaactgtctgcctgcctggttgcctaaaccagagctgtggctccaactgctgccagccctgctgccgcccagcctgctgtgagaccacttgcttccagcccacctgtgtgtccagctgctgtcagcctttttgctgctgatcaagtcccaagagaaccaccatcctcacacaacaactttctgctcaactgacttatcttttgggggactaatttaatttgctgctgacagccaccatgctctcacccaaatttttatgaattctctacctgtttaaaatcttgggaatctacttgagggagggcagaatacttcatcctgattctctttttccttacactttgtggatcatgtgccagcttcgtgtgttctcaattttgagtcatggtctcagctttgactcaaaagtcaagagcttcattctctgcttctaaggaatttaggtttctgcaactgatcaataatctttgcaatcatatttttgttttcaatatcctcctcatggttcttgtatccttctttcttcttttcataactttgggttatgtttctgctaccagcagagattcttagctatatgtttctgaataaactctgaaccatcctcatctcatatggtgttttgttttatatgaaagcattcctgatatgagatttacacacatatcacataccataggtattatccaatttgattctcaaaacagatggtcgtgtgttattacctccattttttcagctgagaacaatttaatgtgtgatgttatgtagctagtaaagggcagactcttgtccaagctgaggtcctctctttctgcccaaggacacttacatttaactctcaatatagtagaaatgacattggaagtaagtattagcaagtcatatacttgagtttttttaacaataggacaaataatctcttatatttgcagataacgtttttgtttacaaaaaattcccaatttcccacacctcagtgagaaacagctgcgtgatatggcagcagggactgcatttaatggctgccctgaatgcagggagctctttttgtctcagcctctgaccagccactcattcaattcatctacatcaaaaaaagcttgggaatttattgtggactcatgagagagagtctcatctgaagaaacttgttgtcaatatcatgtaaataaaatacttatacagccttcatctcctgaatacctattgatgaagtaaatgaaactaagttatttcttgtaaaatgcagaccatacattttgccacattaagacaatttgtcccctaattgtaatgttatgagggaaattatgtaagaacaaagctgagaattgagaaactacacaatgggcatgtaagacttggcacaatccataatctctgagccaagtaagggaatgaaacagccttctgcattttgtgaggccaataggaagcattcaaagaaatgaaaaacttgtgtttccagggaaatcagaagaatgtaagaaaggagcaaagtagaacttgtgcattcatagaagtcataatagacagaggttagtgctttgggtcctgaaccgatgtaagctaagcattcacccatggaaagattgattgatacaggctctgagagaaatataaaagttggggacctgggtcaccttcttcggacctcctaccagcactggagtgctagaattacctctgatcagctaaaaatgtagatttccatgacagatgccaacttctgagactgtgaatctagaatgctctgaagacttggctaagagacaacggccacttactgtgatcatcgttcagggttgaagtaaaggagatgaaaactaggacattctctttgactagcatcatttatgaaagatgaataagttcagcatgtctactgtacagtaatgtgactatagttaataacactttatcatatacctgaaatttaccaagaaggtagatcttaaatgttcacaccacaaaaattaaaaggaaatggtagcttcgtgacctaataaacatattattcacaaggaatatatatatcagaacatcaccttgtatacctgaaatagatacaacttttatttgtcaattatacctcaatacagctaggaaaaaaagtatttagttgatctagttaattattacaaaaatattcctatcttcaacattaaaattggtaattttctgaacaagaaacactaatatgttctggattgcctgctataggatgggtatttgctaaacactttgtgtacattattattaactctttaacaaactttcagaataggtattaatattcccagcgtagagataagaaaattgaggctgagggagttaacataatgtcatagattagtttctcccgaaaagactttgaagaaaagattccagtgaaactagtttactgggaagtgcagatcacaccggtaggaattggggaagtgatacagaaaagggtacactataaagtcagtatcacagtcaccaactaaagcttaaactaaagggaaaactatcagaaatgatgaaaaacacacagctagaattatcctacttcaggaatgaggaagctagagtctttataaatcagctctccagaatcattggttgagtgtttttctctgtgttgcattcacaggtggcatgactttctacagctgcaatacaagagcccttggccacagagatgcggactctgacagatggaaattaatccaagcacactaacatgcaagatatatgggcgcacttacgaaaacttgtctgagatctacaattagctccactcaagtcaaatctttgctgtttaaatgtgatggagagccacaagctctaaaagaaggaagaagcagaggagaggaagagaaggaacagaagatgagaggaggaaagagaaaagaaacaaaaaagaaaaagagaagggaggaagaaaggaaggaaaaggaaagggaagggaagggataaaggaaccaaaaaaaaacatgaaggaaggaaggagaaggggtgattgaagaaaaagaaagaaagaaaaatgaagaaggaaacgaaaagctgggggaggaagtgagatataaaatgaaggccaatgaaataagctacacttactgctgctataatacagtgcacctgagattcataagctccattaattaccaccagtcctattctcccttcacccctggccagcactcttgtttgtctagataactgcctgagggagtagctcagagcatccttcctgaagggtctgagcccctggttactataccactgtccgctgtgattactgtttttactgttttgtggttatcactgggcatggacacactatgagattctgcagtgttatgggttaatttgtgtcctccaaaattcatgttcaaatagaatcatttaaaatgttatgtgataagaaaaggtcatattggaaacaattaggcttctgattaaatatgactgatatctatacacaagggggaaattcagagacagtatgcatatagtagaaaacttatgtcaaacacacatggaaatgatagacatctacaagtcaaggagagagacctggaacagatacttccctcgcaggcttcagatgaaaacaacattgccaacagcttaattccagactagaggcctttggaactgtgaaaaaataaatttaagccacttggtttgcagtaatttaccatggcactgctagtaagttaatatactcagtaaatcacctgagctatagatacattctcctacactatgtggcttgaggataattacccctcaccaaatagtaactcctttctctgtctgctgctctcctgacatgaagagtccaaagtgactatgcaataacgattacttttgattatgctaaagaaatagagaagcaaatactgtaatttttatttacatgaatattttttaaagccaaaagttagctataggattacaacttgacagagtgattagctgtctttgggaatgagtaagaggatataattgggagagaatgggattaatttctattttctaacatagatgtaatggggacatagatgtatttacaatataataatgtatcaagttggaaattaataatttgcattcctctgaaatgaatggtaattcctagaaaatgttttaaacatgttagaactccacgatgaatcaggtgtcatctcaactcatctaattaattcattaaatagaaggagaggctgtggatggtggctcatgcctgtaatatcagcactttgggaggccgaggcaggcagctcacaaggtcaggagttcgagaccagcctgacaaatatggtgaaaccctctctctactaaaaatacaaaaattagccgggcatggtggccggcatctgtagtggcagctactcgggaggctgaggcaggtgaatcccctgaatcgaggaatcagacgttgcagtgagccgagatcacgccactgcactccagtctaggcgacagagaaagactccgtctaagaaagaaagagaagaaatgatactgactgtgctagtaaccagggttatggctagagccacagcttatgcacgttggcctgaatctcaagcagttatgtcatagaaagttctacattctcatcccggtaatccccacactcgcagacaagtgagaatgaatgctcacccctgggcgtagattgcttgatgctgtctaaatcccagtggatttctctgcatccacctgctctcgatcggctctgccacatggaacacactgtgacagacaccctcttcccaagtgacgttcaaataactgaaagacacaggtggtgaggattgcacagagatgcctgttagtcttgagtcagaatttggtgggtgaattgtcttgggcccaggcatggattcattttgtcaccgtaaatatatcagcatcatgcttctccccacagacacttcccagtctacatacagccaactgtgaggctgggcagagagaatttcctgagcttcccagatcaccaagaactatcacatgactagatgatggtcagagcaggaatgatgctgatgatgagatgggcttccttttatctgaaaggaagtttctatgagtaattcacaattaagaaacagattaaacccttactttcaaaagattcataagttttcagaaacaatttcccctttgacaatcccaaagggactgtggaaaacagtgtaaacagaaacaaggaaaagtcctgctgattggtggaaactttggaagccaggtgtataaaaggtccagattgcaaggggtcatcagattctgggaaactcacctctgaacagaaacccaccctccacccctgacaccatgacccactgttgctccccttgctgtcagcctacctgctgcaggaccacctgctggaagcccaccactgtgaccacctgcagcagcacaccctgctgccagccctcctgctgtgtgtctagctgctgccagccttgctgccgcccagcttgctgtcaaaacacctgctgcaggaccacctgctgccagcccacctgtctgaccagctgctgccagccttcctgctgcagcacaacctgctgccagcccatctgctgtgggtccagctgctgtggccaaaccagctgtgggtccagctgtggccagagcagctcctgtgcacctgtgtactgcagaagaacctgctactacccgacgactgtctgcctgcctggttgcctcaaccagagctgtggatccagctgctgccagccctgctgccgccccgcctgctgtgagaccacctgctgcaggaccacttgcttccagcccacctgtgtgtccagctgctgccagccttcttgctgctgatcaagtcccaagagaacaaccatcttcacacaacaaccttctgctcaactgacttatcttttggaggactaatttaccttactgctgacagcaaccatgttctcacccaaatttttatgaattctctgcatatttaaaatcttgtgaatcagcttgagggagggcagaatacttcatcctgattctctttttcttataccttgtgaatcatgtgccagcttcatgtgttctcaattttgagtcatggtctcagctttgactcaaaagtcaagagcttcattctcttcacttaagaaacttaagttgctgcaaatgattaagaatcttcacaactatgttttcttttcaatatactcatgattcttgtatcctgcttccttcttttaatgatcactttgggttatctccctataaccagggatcttacctatatatttcttaataaataaatttggaactattattcataccatatggtgatttgttttatttgaaaacattcctgatatgggatttacacatatatcacataccatatgtattacccaatttgattctcaaaacagacagtcatgtattattgcctccattttccaactgggaaagttttaatgtgtgatgttatgtagctaatagtggacagactctgatgcaaggttgcgtcttctctttctgtccaaagacacttacatttaactctcaataaagtagtaatgacattgggattcagcactagcaagttatgcacttgagtttatttaacaatggaaataataatctctagtatttggcaagagataacatttcagttcacaaaagtcttcccaaattaattgcccagccgtcagtgagcaacagctacatgatacagcagcagggtctgcatttagcagctgtcatgaatgcagggatcctattggcctataccagccaatcattcaattcacgtgcatcaaagaaattttttaacctttttttaaggttcaggggtacgtgtgccgggttattttatagttaaattgtgtgttgcagggtttggtgtacagattagttcttcacccaggtaataagcataatacctgataggcagttttttgattctcattctcctcccacagtccacccacaggtaagttccagtgtctgttgttcccttctttgtgttcatatgtattcaatgtttggcccccactcttatgtgagaacatgtgttatttggttttctgttcctgtgttagttcccttgggataatggcctccggctccatctgtgttgctgcaaaggacatcatcttgttctttttttccttttttttctgtatagtattccatggtgtatatgaaacacattttctttatccagtctacttttgatgtacattttaagttgactctatgtctttgctattgtgagtagtgctgcaatgaacatacgcatgcatgtgtctttatggtagaacaatttatatgcatttgggtatatacccaataattgaattgctgggtcaaatattaattctaagttctttgagagatcccaaaactgctttccataatggttaaactaatgtgcaattccaccaacagtgtataagtgtttctttttctacaaaaacttgccagcatcttttattttttgactttaataagagctattctgacttgtgtcagagggcatctcattgtggttttaacttgcatttctctaatcatcagtgatgttgatcatttgttcatatcctttttggccgcttgaatgtcttcttttgaaaagtgtctgttcgtgtcctttgaccactttctaatgagattgtttggtttttgcttgtaaatttgtttaacttccttacagattctggatattagacctttgttggatagatagcttgcaaatattctctcccattctgtaggttgtctgtttactctgttgatagtttcttttgctgtgcagaagctcttaagtttaattaggtcccatttgtcaattttttctctttttacaattacttttggtgacttcatcataaaatccttgcctggtcctatgtttagaatggtattgcctaggttgtctgccagcgtttttatagccttaggttttacatgtaagtttttgatccatcttgagttgatttttgtataccatgtaaggaaggggtccagtttcaatcttctgcaaatgactagccagttatctcagcaccatttattaaatcaggagtcttttccccactgcctattttcatcaactttgctgaagatcacatgttgtaggtgtgcaacattatttctgggctctgtattctgttccattggtctgtgtgtctgtttttgtaccagtaccatgcggttttggttattgcagcctgtaatgtagtttgaagtcagataatgtgatgtcttcagctttgttatttttgcttaggattgccttggccattcaggctcttttttggttccatatgaattgtaaaacattttttttctcattctgtgaaggctgtcattggtagtttgataggagtgatactgaatctgtaaattgctttagggagtatggccattttaacaatattgattctttctacccatgagcataaaatatgtttcaatttgtttgtgtcatctttaatttctttgagcagtgttttgcaattcttgttgcagagatctttcacctccctggttggctgtattcctaggtattttgttgttttttgtggctattgtgaaaaggattacattattgatttggctctcaacttggatgttgttggtgtataggaatgctactgatttttgtacaataattttgtatcctgaaactttgctgaagttgctaatcagatcaaggagtttttgggtagagacaatgaggttttctgggtgtaaaatcttcttcacacacagagatagtttaacttccacttttcctatctagatacctttactttatttctcttgccatatttctctggctaggactttcattactattttgaataggagtggtgagatatggcatgtttgccttgttctggttttcaagaggacacatcaaaaacttttcagaatgcatcatatcctcatttgaagagactaattccttcgtatcaaataaatcaaattcatatctggcctcctgctgaaatttcattgaaagagcaaaatggaattaagtaattccatgtaaaatacagaccataccttatgcaacatttagacaatttgacttcctgataaaaatgttatcaggaaaattaagtaaggacaaagtttaggattgagacactatgcaacaggcacatatgactttgcataatccataatctctgagttatctaatgggttaaaacaatcttctatgctttatgaggccaaaattaagcatctaaaggaaataaacatttgtgttttcagggaaatcagaagaatgtaagacggactgaaagtagaaaaatgtgtacattcatagaagtcatgataggcagatggctggtgcttttggccctgaactgatgatgcaacccaagcattcactaatggaaggactgatttatactggctctgagagaaatagaaaagtctgggacctggattacctttgtgggacctcctaccagcatgggagtgctagaaatacctctgatgagctaacgatgtagacttccaggacggatcccaacttctgagactgtgtacctagagtgctttggagacttggctaagagacaaaatccattgactgtgattcttctggggtgacagggtaaaggagatgaagacctaaaacattcactttggccaagatcaggtatgcaaggtaaataagctctgcagacctagtgtacagtagtgtggctgtaggtaaaaatattttattttatacctgaaatggcaagtatgtgagctaatgaatatgtgaattagcttcactgtgatgaatatctcactataaatatatatatcaaaacatcactttttataccttaaatatatacaatttttattcaattatacctcagtaaagttagtaaaaaccaaatctagcagcacatcaaaaagcttatccaccatgatcaaattgcttcatccctgggatgcaaggctggttcaacatatgcaaatcaataaacataatccatcacataaacagaaccaatgataaaaaccacatgattatctcaatagatgcagaaaaggccttcgataaaattcaacatccttcatcttaaaaactctcaataaactaggtattgatggaacatatctcaaaataataagagctatttttgacaaacccatagccaatattatactgaatgggcaaaagctggaagcattccctttgaaaatggcacaagacaagaacgccctctctcaccactcctattcaacatagtattggaagttctggccaggacaatcaggcaaaagaaagaaataaaggcattcagataggaagagaggaagtcaaattgtctttgtttgcagatgacgtgattctatatttagaaaacctcagtgtctcatcctaaaaactccttaagctgataagcaactttaacaaagtctcaagatacaaaatcaatgacaaaaatcacaagcattcttatacaccgataatagacaagcagagagccaaatcatgagtgaactcccattcacaattgcaacaaagagaataaaatacctaggaatacaacttacaagggatgtgaaggacctcttcaagggaaactacaaaccactgctcaaggaaataagaggggacacaaacaaattgaaaatcattacatgatcatggatagaaagaatcaatatcatgaaaacggccatgctgcccgaagtaatttatagattaaatgctattcccatcaagctacccttgactttcttcacaaaatttaaaaaaaaactactttaaatttcatatggaaccaaaaaagagcccgtatcaccaaaacaatcccaaacaaaagaacaaagctggaggcatcacgctacctgacttcaaactatactacaaggcaactgtaaccacaacagcatggtactggtatcaaaacagatatatagaccaatggaacagaactgagacctcagaaataacaccacacatctacaaccatctgatctttgacaaacctgacaaaaacaagcaatggggaaaagattccctatttaataaatggggctgggaaaactggctagccacatgcagaaaactgaaagtggaccccttcattacaccttatacaaaagttaactcaagatggattaaagacttaaatgtgaaacccaaaatcataaaaaccctagaagaaaacctaggcaataactttcaggacatagacatgggcaaagacttcatgacaaaaatgccaaaaactatcacaacaaaagccaaaattgacaaatgggatctaattaaactaaatagctcctgcacagcaaaataaactatcatcagagagaacacacaacctacagaatgggtgagaatttttgcaatctacccatctgacaaaggtctaaaatccagaatctacaaggaacttaaacaagtttacaagaaaaacaaacaacctcatcaaaaagtgggcaaaggatatgaacagacacttctcaaaagaagacttttatgtggccaacaaacatatgaaaaaaagctcatcatcattgatcattagagaaatgcaaatcaaaaccacattgagataccatctcatgccagtcataatggtgattattaaaaagtcaggaaacaatagatgctggagaggctgtggagaaataggaatgcttttacactgttggtgggatagtgaattagttcaaccactgtgtaagacagtgtggcaattcctcaaggatctagaaccagaaaaaccatttgactcagcaatcctattaccgggtatatactcaaaggaatataaatgattctactataaaaacacatgcacatatatgtttattgcagcagtatttacaatagcaaagacttggaaccaacccaaatgcccatcagtgatagactggataaagaaaatgtggcacatataaaccatggaatcctatgcagccataaaaaacaatgagttcatatcctttgcagggacatggaagaagctggaagccatcattctcagcaaagtaacacaggagcagaaaaccaaacaccacatgatctcactcataagtgggagttgatcaaccagaacacacagacacagggaggggaacatcacacaccagggcctgttgggggggtcgggggcaaggggagggagagcattaggacaaatacctaatgcatgcagggcttaagacctagaggacaggttgataggtgcagcaaacaatcatggcacatgtatacctactcaacaaacctgcacattctgcacatgtgtcctggaacttaaagtaaaagaaaaaaagttgatctagttaattattataaatatattcttatcatcaacattaaaattagtttaggaatttctggagagaaaagaaataatatgttttcagttgcctatcatttgatggatattgtgtaaatcttttatgtacattatcattaattattgaaaaaactttcaaagtaggcattagtgttctaattgtagagatgaggaaattgaggctgagagatgtaatgtcatagtttggtttttcccagaagatactctgagaaaaagattccaatgaatacagtgtattaggaagggcagaacaggccagaagggattgtggcagtgatacagaaaagggtatactattaagccagtatcacagagatcaactgaagcttaagctaaagggaaatttttcagaaatgatgaaaaacacacaactttgaattctcaaacttcagcagtgaagaagctagagtctgtataaatccactctttagaattttcagttgaatatttttctccctgtagtgtgcacaggtgacatgactttctgtagttgcaatacaagagccctaaggcacagagatgcagattcaggcagatggaaattggtatgagcaccctaagttccatgatatacaggtatggtaatgaagacctgtctacagtaacatttgctccattcaagtccaatctttccttcttaaatgtaatggacagccatgaactctaggagaaaaaggaggaggaggaagaggaggaacagaaggtgagagaggaggaaaaaactaggaaagatatgggaagaagacaatatacacagacaggaagaaaggaacggaggaagaaagagagcaagagacagaaggaaagagagtgaaaaggaaggaaggaatgaaggaaggaaggaaggaaggaaggggaaggaaggaaggaaaaggaaagaaagaaagaaaggggaggggaggggtggggaggggaggggaaaggaagggaagggaaggaagggaagggaagggaagggagggaagggaaaagaaactactgctgtaatagggtgcttctgagattcataatctccatcagtttccgccagttctatactcccttcatcactggccagcactcctgttagtttagataattgcctgatgaagtagctcagaacttcctgcctgatgggtcttaccctctagttacttactacaccattgtccaactgtggttgcttttgttactcatttgtgtttatcaatgggcatggatacactacgagatattccaaggttatgggtcgaattgtgtccccaagaactcatattcaaatagggtcacttaaatgcaagatggtaagataaggtcatattggaataaattgtgcttctgattcaatgtgactggtgtctgtataaacaggggaaattcaaacaggatgcatatagagggaagatgatgtaagagacacatggagaagatagacatctacaggtcaaggagagagacctgaaacagatatttccctcacagccctcagatgaaaacaacattgccaacacctttattttagccttcagaactgtgagaaaataaacttcagccacttgatttgccatagtttttaatggcagtgtaatgctttaatatatatagtaaatttcttgagtttcagatatattctccctacgctctatggcttcacgaaaattatccctcatggaatattaactcctttatctacctgctggtctgctaacatgaaggatccaaaatgaaatgaccaggttataattgctgcttttgattatgccaaaaacacagtgaagcaaattctataatttttatttacataaaagtcaaagaaaaaaacaaaactgacctacaggattaaaacttgatagagtgactagctacctttggagataagtaaaaagatataatttggagggaatggaattaatttctattttgtaaactggtaatggggacttagatgtatttataatgtaatattatatcaagttggaattcataatttgcactcttctgaaatgaatggtataatttaaaaagttttaaacaatggtaaacctcaaagaggaatcagatatcatctcaactcacctaattccctcactgaaaacagagagacagagagagagagagagagagagacagagacagagacagagacagagacagagacagagaaatggcaatgattgtgccagtaacctggattagggctagagccacagctcatattgctttgcctggacctcaagcagtaatgtcacagtaattcccagtcccacattctcatgctggtaagcccctcagtcccagacaaatcagggtgaatggtcaccgcagcacgtagattgcttgatgctttgtgaattccagtgaacccctcctctttctacgtgtttgctttggctctgctctgccacatagcacacattgtgctgaacaccctcttcccaagaggcttttatagaactggaagagacaggtaaagtaggttgtacatagagagatgcctatcagtcttgaatcagactttggtgggtgaacagtcttggtcccaagcatggattcaattcaccactgtgaatatatcaacatcatgcttctccccacagacacttcccagtctacatacagccaaaggatgagactgggcagagagaacttcctgagcctccccagtcaccaggaactatcacatgacgagatgctggtcagagcaggaacgaagctgatgatgagactgccttccttttatctgaaacaaagtttctacgagtaatttacaattaagaaacagattaaacccttactttccaaagattcataacatttaggaaatgacttcctctttgacaatgccaaactgactatggaaaacaactgtaaacagcaagaaagaaaaatcctgctgattggtggaaactttggaggccacatgtataaaaggtccagattgcaaggggtcatcaaatcctgggaaactcacctctgaacagaagcccaccctccacccctgacaacatgacccactgttgctcccctggctgtcagcctacctgctgcaggaccacttgctgcaggactacctgctggcagcccaccattgtgaccacctgcagcagcacaccctgctgccagccctcctgctgtgtgtccagctgctgccagccttactgccacccaacttgctgtcaaaacacctgctgcaggaccacctgctgccagcccacctgtgtgaccagctgctgccagccttcctgctgcagcacaccctgctaccagcccatctgctgtgggtccagctgctgtggccaaaccagctgtgggtccagctgtggccagagcagctcctgtgcacctgtgtactgcagaagaacctgctaccaccccacgactgtctgcctgcctggttgcctcaaccagagctgtggatccagctgctgccagccctgctactgcccagcctgctgtgtgtccagctgctgccagcattcttgttgctgagcagcaccacagaggaccatcatcctcacacaacaaccttctgctcaactgaccttttttttcttttgagacggagcctcactgtcacccaggctggagtgcagtagcacgctctcggctcgctgcaacctccatcttctgggttcaagtgattctcctgcctcagcctcctgagtagctgggattacatgcctgtgccaccacgcctggctaattttttgtatttttagtatttttagtagttttcaccatgttgatcagacttgtctggaactcctgccctcaggtgatccacctgcctcagcctcccaaagtgctgggattacaggtgtgagctaccacacccagacccaactcacttatctttcagaagacagatttactttcaaactttactgatacacagtatgctttcaccaattttttttatttctttgcctgtttaaaatcttgggaatcagcttgagggagggcagaatacttcatcctgattcttttttccttacactttgtggatcatgtgccagcttcatgtgttctcaatgtggagacatggtctccattcgactctaaagtcaagagcttcattctctccttctaagaaacttaggtttctgcaactgatcaataatctttgcaatcatatttttgttttcaattttgtcctcatgtttcttttacccttctttcttcttttcattgtaactttgggctatgtccctagtagcagggattcttacctatatatttctgaataaattctgaaccatccttcatctcatatggtgttttattttacagaattgctgatatgagatttacacacatattgcatgctatatgtattatccaatttgattctgaaaacagagttattattatgtattattacctcaatttttcagctgagaacaatttagtgtgtgattttatgtagctaataaaggacagactctagtccaaggtgagagcttctctttctgcccaagaacacttacatttaactctcggtaaagtagaaatgatattgagactcagcaatagcaagacatgcacttgagtttatttaatgtgggaggtataatctctcatatttgcagacgacatttctgttcacaaaggtcttcccaaattagttttccacacctcagtgagtaatagctacatgggatgacaacagggacggcatttaatagctgccctgagtgaggatccctttttgtctcagtctttgaccagctatttattcaattaatctgcatcagaaaattttgagaatgcattgtgtcctcatgagagaggatctcatttggggatttttttcctggtatcacgtaaataatattcttatatggcttccttctcctgaatacctgttgacaaagcaaaaagaatttaagttattccttctaaaatatggaccatacattaagccacattaagtcaaattgtccctcaaatcaaaatgttattaggaaaattaagtgaaacaaatttggggattgagggactatgcaatgggcatgtatgactttgtacaaaccataaaggtataaaacaaccttctgagttttgtgaggcaaataggaagcatctcaagaaaccaaaaacctgtgtttccagggaaatcagaagaatttaagaaggaggaaacgtggaagaactttctcattcatggaagtcatgatagatggaaaactggcgcttttgttcctgaactgatgatgcaactgaagtattcagtcatggagggattcattgatactggccctgagagaattagaaaagttagggacctgggccaccttcttgggacctcctaccggcatgggagtggtagaaatacctctgaggagctaacaatgtaggtttccaggacagataccagcttctgaggtggtgtatctagaatgctcagaagactcagctaagggacaaaagccactgactgtgatagttgttgcataatggggtaaagaaactgaagaactatcacattctctttgaccaacatcggttatgcaagatgagtcagttctgcagatctagtgtacagcaacgtgactatagttaacaaaaatgctttattttatacctgaaatgtgctaagaaggtagatctggagtgttgctaagaaggtagatctgaagtgtttacaccacaaaaataaaaaggaaatggtaactatgtgagctaaggaatatatgataattcacaataagtatatacatatctcaaaacatcacctcgtacacattaaatatacacaattttatttttatttatcaattatgcctcaataaagctagtaaagaaagaagtgagttgatctggttaattattattcatgtattcttatcttcaacattaaaattaggagttctctggacaaaaaaaaaactaatatgtcctaggttgcctactatttaatgggtattgattaaatgctttatgaacattatcattaattcttgaagaaacattcaaagtaggtattaatgttcccattgtagagatgagaaaattgagtctgagagaggaaatgtaatatcagagtttggttttcccataacaaactccaagaaaaatattccagtgaaagtagtttattggaaagtgcagatcacaccagcaggtattggagaagtgacacagaaaagggtagactattaaactagtatcacagtgaccaattaaagcttaaaccaaacaaaacactattagaaataatgaaaaacaaacaaattagaattatcctacttcaggaatgaggaagctagagtcttcacaaaccagtgctctggaatcattggttgagtgtttttctctgtgtggcacgcacaggcgacatgactttctgcagtaacaatacaagagcccataggcacacagatgcagatttgggcaaatgcatattggtctgagcatactaagatccaagatataggaatgggataaggaaatcctatctacaatctaccatttgctccacacagacccaatctttgcttcttaagtgtggtgggcagccacaaactctagaagaaggaagaggaggaggaaaggaagaggagaaagaggaaaaacagaaaatgagaggaagaagaaagatggaaaaatgaaagaaagagagaagaaaggaaggaaggaaagaaggggggaaggaagaaaggagggaaggagagagggaaggaagaaggaaaggagggatggaaggaagaaaggaaggaggaaagaaagaaagaaagagagagagagaaggaaggcaggaaggagagagagaaaaagaagaaagagaaagaaagaaagaaaaagaaaaagaaagaaagaaagagaaagagagagagggagggagggaggaaggaaggaaggaaagaaggaaggaaggaaggagaaattaagaagcaaagaaaggagggggagagatatgtaaaatgaaggccaatggaacaagcaacagttactgctgctataatagggtgcacctgacagccataatctccattaattatcaaaagtctatagttccttcaccactttccagaacttttactactctagataatttccggaaggagtaacccagatgttcctgcccaaagggtctgagccactagttactgtaccactgtccactgtgattgctgttttcactcacttgtggttatctctgggcatggacacagtatgagattctccagtgttatgggttgaatgagtcccccaaaattcatattgaaatgaggtcattgaaaacataattagttaagatcaggtcatattggaacaagttaggcccctgattcaataggactgatgcctgtatagaatggggaagttcagacgccatgtgcatctagaaggaagatcatgtaagagacatatggagaagacaggcatttacaagtcaaggagagacacctggaagagatgctttcctaacagtcctcaggtaaaaacaaccttgtcaacaccttaaattcagactactagccttcagaactgtgagaaaataaatttcagccacttggtttgtagtggtttatcatggcagtgctagtaaattaacatattcagtaaatctcctgagctacagatacattctcctacattctacgccttcaggataattacccctcaccaactctgttctctgccttctaatctgctgacatgaagagtgcaaaatgactaggcggtaattattacttgcgattatgcgaaagaaatagagaaataaattttgtaatttttattcacacagaagtaaaaaaggaaaagccaaattgacctacagggttacaacttgatagagtgattagcggttttgggggatgagtaaggaaatataactgaaagggaatgggattaatttctatttcctaacctggtaatgggaacacagatgtatttacagttatatcaagttggaaattaataatttgcattcttccaaaatgaatggtatacctaaaaaatgtttaaatatgttggaactccaagacaaatcaggtatcatctcaactcatctaattccttcattaaaaagaaatagacagagagagaagaaatggccctgattgtgttagtaccagagttagggctagagctacagctcatgcaggtttgcctgaatctaaagtagttatgttacagaaagtcccacattctcatcctggtaagtccctcactcccagacaaatcaagatgaatggtcaccccagggcaaagattgcctgatgttatctaaatcacactggacttctctttgtacccacctgctttggttctctctgacacataaaacacattgtaccaatcaccctcttcccaagtgactttgatggagctgaaagacacaggtggtgtgggttgtacagagagcaatgcctgttagtcttgaatcagactttggtggctgaacaatctaggccacagatatgaattcatttagtcattgtgaacacatcagcatcacgcttcccgcaacagacacttcccaatctacatacaaccaaagaaggaggctgggtagagagaacttcctgagcctaaccggtcaccaggaactatcacataatcagaagatggtcacatcaggaacgatgcagatgttgagaggggcttccttttatcgaaaataaactttctatgagtaaactacaattaagcaacagaaaataacagaaaactaagaaattaagcaacagaaaattaaataattttcttctgaaaattactttcaaaagattcataacctttaggaaacaacgtcccctttgacaataccacaatgactgtggaaaacaatgtaaacagcaacaaggaaaagtcctgctgtttggtggaaactttggaggccaggtgtataaaaggtccagattgcaaggggtcatcagattctgggaaactcacctctgaacagaaacccaccctccacccctgacaccatgacccactgctgttccccttgctgtcagcctacatgctgcaggaccacctgctgcaggacaacctgctggaagcccaccactgtgaccacctgcagcagcacatcctgctgccagccctcctgctgtgtgtccagctgctgccagccttgctgccacccaacttgctgtcaaaacacctgctgcaggaccacctgctgccagcccacctgtgtgaccagctgctgccagccttcctgctgcagcacaccctgctaacagcccacctgctgtgggtccagctgctgtggccaaatcatctgtgggtccagctgctgccagcccagctcctgtgcacccatctactgcaggagaacctgctaccaccccacgagtgtctgcctgcctggttgcctaaatcagagctgtggctccagctgctgccagccctgctgccgcccagcctgctgtgagaccacctgctgcaggaccacttgcttccagcccacttctgtgatcagctgctgtcagccttcttgctgctgaccaactctccagaggaccaccatcctcacacagcaaccttctggcaaccttctgtcctcctcttggaggacaaatttactttcaaactttgctgacaaccagcatgctcaccctaatttttatgacttctctgcatgtttaacatcttgtgaatcagcttgagggagggcagagtacttcatcctgattctttttttctttataccttgtagatcatgtgccagcctcatgtattttcaatttgagtcatggtctcagcttgactctaaagtcaagagcttcattctctttctccaagaagcttaggttttgcaactcatcaatgatcttcacaatcatgttttcattttcaatgtcctcctcgtgtttcttgtatccttcttttcatgatcattttgggctatctccctagaaacagggaccattacatatatgtttcttaataaactcaaaaccattcttcttatcacatggtgtttttttttattttacagcattcctgatatgggatttacacacatattgcataccatgtatgttacctaatttgattatcaaaacagacagtcatgttttattacctccactttccagctgaaaaaattttaatgtgtgatgttatttagctaaaaatggacagactcagatgcaaagttgggtctttttttctgtccaaaggcacttacatttaactctcaataaagaaaaaactatattgggactcagcattagcaagatatgcacttaagtttacttaacaatggaggaataatctcctgtatttgcagataacatttccattcttatatggcttccttcttcttctcctgaatacatattgacaaggcaaaatgaacttaaattattccttataaaatacagatgccatcttttgagactgtatatctgggatgctgtgaagattccagagagagagaaaagccgctgactgggatagtcgttgggtgatggggtaaaggagacgaagaactagcacattctctttgacctacatcagttatataagacaaataagttttgcagatctggtgtacactaatttggatatagtttaaaatacttttttgtacacctgaaatttgctgagaaagtggatcttaaatattcccaccacaaaaataaaaaggaaatggtaactatgtgagctaataaatatgtgattatttcacaatgaatatatatatcaaaacataaccttttataccttacatatacacaatttttatttgttaattatacctcaaaaaagctagtaaagaaagaatttagttgatctggttagttattatacatatattatcttcaaaattaaaattattttttaagttttctggacaaaaaaagaactaatatgttctgggttgacttctatttgataggtagtgactaaatgctttattttcattaatatttattctcaaagaaatgttcaaagtaagtattaatgttaccattgtagagaggaggaaattgaggctgagagagttaatgtaatatcatagtgtggtttctcccagaacagataccaagaaaaatactccagtgaaagtagtttattgggaagtgcagatcacaccggtagggatcaggaaagtgacacagaagagggtacactattgagctggtaagtatcacagtgactaactaaagcttaaaccaaagggaaaactattagaaatgatgaaaaacacataaattagaattctccaacttcaggaataaaggagctagagtctttgtaaatcagctccccagaatcaatggtcgagtgtttttcgctctgtggcatgcagaagtgacatgactttctgcaggtacaatacaagagcctttaggcacagagatgcagattctggaagatagaaactggcctgagcacactaaaatccaaaatatatggatgggataatgaaaacgttatctatgatctgccatttgctctactcagatttattctttgcttcttaactgtgatggatagccagaaattctaggaaaaggagggaggggaggagaggaagaaaatggacagaaaggtctgagctgctagttactgtaccattgtccactgcgattgctgttttcactcatttgtggttatcactgggcatggacacactatgagattctccaatattatggcttgacttgtgtcccccaaaattcatattcaaatagggatattgaaactgtaattacttaagatccagtcatattggaatcaggcttctgattcaatattactgatgcctgtatagaatgggtaagttcagaggcagtgtgcatctagaaggatggtcatgttagagacacatggagaagacagacatccacacttcaaggagagagacctggaacagatgctttcctaacagtcctcaggtgaaaacaaccttggcaacaccttaaatccagactgctagccttcagaactgcaagaatataaatttaagccacttggtttgtagtggtttatcacagcagtgctagtaaattagtatgttcagtaaatctcctgagctacagatacattctcctacatgccatgaaaacaggataattacccctcaccaaaaaggaactcttttctctgccttctgatctgctgacatgaagagtgcaaaatgactaggcaataattattacctctgattatgcaaaagaaatagagaagcaaatattataatttttattcacacgaagtaaaaaaggaatagccaaattgacctacagggttgcaacttgatagagtgattagtggttttttgggatgagtaaaggaatataatttaaagggaatgggattaatttctatttcctaacctggtaatggggacatagctttatttacaaagttataacaagttggaaattaataatttgcattcttctgaaatgaatggtatacctaaaaaatgttttaatatgttagaactccaagacgaatcagctatcatctcaactcatctaatttcttcattaaaaagaaatggagaaagatagagaaaagaaatggcactgactatgctactaccagagttagggctagagccacagctcatgctggcttgcctgagtctaaagcacttatgttacacaaagtcccacattttcattatggtaagcccctctctcccagacaaatcagaatgaatggtcaacccagggcaaagattgcctgatgctatctaaatcccactggacttctcctcgtacccacctgctctggttctgctctgacacatagaacacactgtaccaatcacccttttcccaagtgactttgatggaggtgaaagacacaggtggtgtgggttgtacagagagagatgcctgttagtcttgaaacagattttggtgggtgaacagtcttgaacataggcatggattcattttgtctttgtgaccatatcagaatcatgattctccccacagacacttgccaacctacatacaaccaaagaatgaggctgggtagagagaacttcctgagcctccctggtcaccaggaactatcacatcaccagaagatggtcagagcaggaacaatgctgatgatgagacgggcttccttttatctgaaatagtttctatgagtaatccacaattaagcaacagattaaacccttactttcaaaagatttataacctttagaaaacaacttcccctttgacaataccaaaatgactgtggaaaacaacataaacagcaacaaggaaaagtcctgctgattggtggaaactttggaggccagttgtataaaaggtccagagggcaaggggtcatcagatcctgggaaattcacctctgaacagaagtccaccctccacccctgacaccatgacccactgttgctccccttgctgtcagcctacctgctgcaggaccacctgctggaagcccaccactgtgaccacctgcagcagcacaccctgctgccagccctcctgctgtgtgtccagctgctgccagccttgctgccacccaacttgctgtcaaaacacctgctgcaggaccacctgctgccagcccacctgtgtgaccagctgctgccagccttcctgctgcagcacaccctgctgccagcccatctgctgtgggtccagctgctgtggccaaaccagctgtgggtccagctgctgccagcccagctcctgtgcacccatctactgcaggagaacctgctaccaccccacgagtgtctacctgcctggttgcctaaaccagagctgtggctccagctgctgccagccgtgctgccgcccagcctgctgtgagactacctgctgcaggaccacttgcttccagcccacctgtgtgaccagctgctgtcagcctgcttgctgctgatcagttccgcagaggaccatcatccccatacagtaaccctctggcaaaagatttaccttctgggggacaaatttactttcaaactgtgatgaaaaccaacaaagtgaacttagggtgaactttgctcaccctaatttttatgacttctctgcatgtttaacattttgtgaatcagcttgagtgagggtagagtacttcatcctgattcttttttccttacaccttgtggatcatgtgccaccttcatgtattttcaatttggagtcatggtctcagcttgactctaaagtcaagagcttcattccctttctctaagaaacttaggttttgcaactgatcaataatcttcacaatcatgttttcattttcagtgtcctcctcgtggttcttttatccttattcctttcatgatcattttgggttatctccctagaaacagggactcttacctatatgtttcttaataaactcaaagctgtccttcatctcacatggtgtttttttttattttacagcattcctgatatgggatttacacacatattccataccatacatgttacctaatttgattataaaaacagatggtcatgttttattacctctactttccagctgaggaaaattttaatgtgtgatgttatttagctaaaaatgcagactcagatttaaggttgggtcttctctttctgtccaagagcacttatatttaactctcattaaagtaaaaattacattgggactctacattcgcaagacatgcacttaagttgactcaacaatggaggagtaatctcctgtatttgcaggtaacatttgcagataacatttccattcttatatggcttccttcttctcctgaatacatattggcaaggcaaaatgaacttaagttattccttaaaaaatacagatgccatcttttgagactgtatatctggaatgctctgaagattccagaaagagagaaaagccgctgactgggatagtcgttgggtggtggggtaaaggagaactagcacattctcatgaccaacatcagttatataagacgaatatgttctgcagatctggtgcactctaatgtggacatagtttaaaatactttattgtatacctgaaatttgctgagaaagtggatcttaaatgttcacaccacaacaataaaaaggaaatggtgactatgtgagctaataaatatattattatttcacactgtatatatatatatacctcaaaacataaccttttataccttacatatacacaatttttatttgttaattatacctcaataaaactagtaaagaaagaatttagttgatctagttagttattttaaatatattcttatattcaatattaaaattattttttaagttttctggacaaaaaaagaactaatatgttctaggttgcctactatttgatagatagtgactacatgctttatgttcattaatatttattcttgaggaaatgttcaaagtaggtattaatgttaccattgtagagatgaggaaattgaggctgagagagttaatgtaatgtcatagtgtggtttctcccagaacagatacttagaaaaatattccagtgaaagtagtttattgggaagtgcagatcacaccattagggatcagagaagagatacagaaaagggtatactattgagccagtaagtatcacagtgaccaactaaaatttaaaccaaagggaaaactatcagaaatgatgaaaaacacataaattagcaatctctatcttcaggaataagggagctagagtctttgtaaatcagctctccaagatcattggttgagttgagtgatagtcctctgtgtggaatgcacaggtgacatgactttctgcagttgcaatacaagagcccttaggcacagagatgcagattctggcaaatagaaactggcccaagcacactaagatctgagaaatatggacaggataatgaaaatgtcatctatggtctgtcattcgctccactcagatccaatctttgcttcttaactgtgatggacagccagaaattctaggagaaggaggtagaggaggagagaaagaagagggacagaaggttctgagctgctagttactataccgttgtccactgtgattgctgttactcatttgtggttatcactaggcatggacacgctctgagatacttccatatttggattgatttttttccccagaaattcatagccaaataaggtcattgagaatgtaactagttaagtaaggtcacattggaataaactggtcttcttattcaatatgactggtgtctgtatgaaaaggatggtagaatagaaggaagggaaggtaagaggaaaggaaggcaggaaggaagaagggaaggagagatataaaataaaggccaaatggaacaagatacagttactactgtaatagggttcacctgagattcatcatctccattagttaccacaagttctatactcccttcaccactggccagcacttctgttgtctagataattgcctgatgatgtaagccagaacctcctgcctgaagggtctgaccctctagttactgtgttattgtccactgtgattcctgttactcatttgcagttatcatcagccatggacacactctgagatacttcaatatttggattgacttgtttccccagaaattcatcaccaaatagggtcattgagaatgtaactagttaaggtaaggtcacattggaataaaatgggcctctgattcaatataactggtgtctgcatgacaagtaaagttcgccacacacctacagtcacctcattttcaacaaaggtgccaagagcatacactgggaaaaaggcattctcttcaataaaccatgctgggaaaactagatatctctatgcagaggaatgaaactagatccctctttctcaccacatacaaaaatcaaatcaaattagatcgaagacttgaatctaagacctcgaactatgaaactactacaagaaaatattggggaaaatctccaggacattggtctgggcaaaaatttcttgagcaataccccgcaagcacaggcaaccaaagcaaaaataaacaaatgggatcacatcaaattaaaaagcttctgcacagcaaaggaaacaataacaaagagacaacccacagaatgggagaaaatatttgcaaaatacctatgcattgttaatgaattaacaaccagaatataaggaggtcaaataattctataggaaaaaaaatctaataatctgatcacaaaatgggcaaaagatttgaattgacatttctcaaaagaagacatataaataagcatatgaaaaggtgttcaccatcattgatcatcagagaaatgcaaatcaaaactacaatgagagatcatctcaccccagttaaaatggcttatatccaaaaggcaggcaatgacaaatgctgatgcagatgtggagaaaagagaacgctcgtgcattcttggtgggaatgtaaattagtacaagcgctatggaagacactttggaggttcctcaaaaaactaaaaactgagctaccatattatccagcaatcacactcctcggtatatacccagaagaagagaaattggtatatcaaagagacatctgcactcctatatttgttgcaacactgtttacaatagctaagatttagcagcaatgtaagtgtccaccaacagatgagtggataaagaaaatgtggtacatacaccaaatgaagtattattcagccataaaaaagaatgagatcaagtcatttgcaacaacatggatggagttgaagatcattatgttaagtaaaataagccaggcacagaaagacaaacaccacatacacatccggagtaggttgcacaaagacaggtaggtgcctgttattcttgaatcaggccttgtaggtgaatagccttgacgcaggcatggattcagttcatcactgtgaacctatcagcatcatgctcctccccacagacactccccaaagaacaagctggggagagacacctgccctgaccttccaaggccagtaggaactatcacatgaccacatgatgaccagagcaggaaggatgtcaatgatgtgaccaccttccttttatctgaaacaaagtttctaacagttattctcaattaagaaacagattaagcccttactctcagaagatctataatatttaggaaacaacatcctcttcaataatcccaaactgactacggaaaacaatgtaaacaacaacaaggaaaagtcctgctgattggtggaaactttggaggcttagtgtatagaaggtccagattggaaggagtcatcagattccgggaaatttacctctaaacaggagcccaccctccacccctgacatcatgacccagtgttgctccccttgctgccagcctatgtgctgcaagaccacctgctacaggagcatctgctgtgggtccagctcccgcccgccttgctgtggcccaatttgctgtgcaatcacctgctacaggaccgtctgtgtgaccacctgctgcagcccaccctgctgccagcccacctactgtgagtccagctgctaccagccttaccaatgaactaactcccactcccctgactttgttgacaaccaacatactgttgccaaacatttgatgtgttatattgttaaattgtgaggctgcttagtgaagtggagctggcttcactttgatttttctcttccttatttcctatatatcagagtgccagctgctagtcatcttcatggatccttgacatgaactcaagatctcagccaaggaaaaattgtcatccccttttccctctaacaatcttaaaatatcaaatccctaagactgttctcttaagtctctgcaactgatcaatattgctgcaaacgcccaatatcaaccacgttatatcaatgtactcattattcctgtgtcctgcttctcacctccataatcagttagaattatcttcaaggatctagaactagaaataccatttgacccagcaatcccattactgggtatatacccaaaggcttataaatcatgctactataaagacgcatgcacacgtatgtttgctgcggcactattcacaatagcaaagacgtggaaccaacccaaatgtccatcagtgatagactggattaagaaatatggcacatatacaccatggaatactatgcagccataaaaaaggatgagttcatgtcctttgcagggacatggatgcagctggaaaccatcattctaagcaaactatcacaaggacagaaaaccaaataccgcatgttctccctcataggtgggaattgaacaatgagaacacttggacaaagggcagggaacaccacaccccagggcctgtcatggggtgggggtcagggggagggatagcattaggagaaatacctaatgtaaatgacgagttaacgggtgcggcaaaccaacatggcacatgtatacctatgtaacaaacctgcatgttgtgcacatgtaccctaaacttacagtataataaaaaaattattttaaaaaaaagaattatcttcctaaagtctttcctgtcatggaccatacattggggttttgttctgcacagctattcctttaaaaggccttgcatgtgtattgtatttcctattatctcttctaatctcatagtaaccccacaaggtgggcaaagcaaagactatcatttgcacattacaaatgggaaaaatcactggcctcaggtcatacagttagaaattgatagaattaagtccaatacccagatgttctgaatcttgatccagggcattattatttagattttaatacaagtagaaataactctggtgtctgagttttagggaaggtgtatgatttgagttgcttgttgacaaatgaaaatgaaatgtcttgtacatgtaggtcacttttctacctaaaaatgcagaatacttgaacaaaaaagactaagaaacaccctgcaatgcgcacaagacacagtttctgtgctccaaatgctggatcaacctagcttctcaatcagaggattataagggtagtgcatatttacagaatcctcagaattgaagtaactgagcaatgggtatataatgctttgatccaaccagtgcctcaatgttgtgaggcaaagttgaagcagaggagattcaacatcagagtattagaaaaagaaaacataaggatttgagaaagaaaataaaggaaactggtcactcttaaaaagtatactggatataatgacaatagacgttattgtagtcccccaaagtgggagctagactttccgaagagctgaacaccaaagaggataccaagatatttcttgaaaaaaaagaacagatactggctccaggggaaaaataatattctgtggcctgagctatcacatagtagttaggtcttaggaaatctaagaaggtggagggattttccaaagaggcttccatgttgtctgacttgctaagtgcttgctctcctgatgcattcaaggatgagctgaggcactaccatttactgagtaactacaggtattagtctaggtttttctaattcataatccaccaatgttttattttcctcatttcacagatgaagaaacagaggctaagggagatgaaggaacttgttcaaagttgtacagttaacagttgacctggcttcaaacactaagctgtctacactacactcactgtgtgtgctatgctccctgcccctaccagtctagagacataaccgggtctatggagtcttgaatatgacagcaaattacttggtaccctcacacagtctcatttccttattctaccaatagttgggacttcgggagagtgaataagaataaagacttacatctggatattaaaacaatcctttatttaaataagatttattgagcacttactgtgtgttaagtactgtgccaggtgctgtgattacagaagtgaacgagacattcaacatcctcacctttattgtgcttcgggaagaatacaaacaagagacaaaatttatacagtagaagtgaggaaggtgagcctatattattaatgatataggaagggtggttcatgacgactgtatctaacagaattgtatcttagcaacgaatcagagagggaaggaaataaaaaacttccattttgaacccatgaatcaatttaccaagtagaacaacaggggtgatactgaaagaactcaggtacaaaaattccccaaaaatgtaaatgcagaaacaataaaacatggttggaatatattaagtacttcccccaaagcctgcagcttgtaggtagcagaacaggcatgatgcaaatactcatctatgtgatttcgatcctcatggcccagactttcctgccttcttccacagtggaaaacctgtgcatgaacaaagaagggaagatgaacccatgagctctctttgtgtggacatactgcagtcttcctggccaaacacaggaaattgatgatacattgcaaaggcagatcacaaaaccagcacacatgggaggagaagggatgaaggaacatccaacaatctagctattttgtggggacctcagaatcactaaaattgagcagaaggttcttaggcaaccaggtaaaccaccttgatctagattttaacaatgagaaggacttggtaagcaaaggttagtgatgataaacttgctgcaaaaggaccatgtaaaaatttgtgatagcaaggcaaggaaatgcttgtttggctggaactgcattctacagagcaggaagataattggctatttacaggaacatgaatgtgattttccagcaaagggcactggaatagaggatggagctaagggtagggaagcgctcagaaaagccattctgattgcttagtcacagatgcttctaatgaggaaaaagttcagggggtctagagtgagtacagaaattctctaaaagctctttaaaagatcttcctaggaatggaacagaccaccccgggtgtatgaatttccatttactagacacttaagcattggatctggcaacacatggcaggaagtttattaggattccttccatgcctgagattctttgagatccttaaacactctgtcttgccccatcattatttgattaattaattgctaacaggttgttattctctgaactccgtaagcattcacatacataatgctttaaagaaagcatacacactgtcatgataattggcattcccttggagataaaaaaaaaaaaaaaataaggactatctccccaatggcatgcaaggtagaattcacaacccttgataaatgtacctggttctggcctttagccttgcagactcagagacctgattttgcttacattctaagggttaagccacgtcttagagcagacacctgttagccaagcccaaaaagcaaggatgcctatttattaaattacaggagaattaagtaacaggaacttctaaaacaccacatgagtaaggaatcagacaggaagttatataaactaaatgttgaatggcatttgacatgttcgtttcacaatagttctcaccaatggaaattgaaaattcatagtccctctcctgtgggcagttgcctggaggcacactgccaacattcaccccagcacttgtcttaaccctgattttccatggttcaacaatactctaatttaactttcacatttttacatcttcaattagacttgaatcaattcctcagactttgaatgcatacatctttttaaggtgacgctacataatttggttttgatcgttttgaacataggttccaagtcttggatgatatctgactgtaccaatgcattctcattcacaccattgcatggtgagcatccatgatgaaatttatatttggtttagttcatgtctaccatcatatctgttgactatttgtaatatttctattgcatgtcaggataacttgggctttgtttatctttcttatctcactaagtctttaaaaaaagattactgtgtgatacagagttgtcatcatagtgataatgtagaattatcatcagagtgttgggttgactcttatgattttgtgtgtgtctttgttcatctaattataatctaacatcaccaacctgttatgagtgacacaccacatacttcttccttcctccctgctgtgagttatagtggtgattggactataattaatttattcttcttagaatttgaattacacataaaagacaatccctaggttaggccctctagtgcaatgtaatattgttatggaaagaacagggattaatttcagaaaaaccagcctgtgtttcctacattcaaaatagggaaaactcggctctttcatcactggacaccttctccttggaacctcttctgacagatggttcagataacacagcttgggatttttcttgtgaatatgcaggaaacaagaatgaatgttatattctaagatcaaacgctgggataaatttaattaaattgtaggtttggagataactaatgcagaaaatataggattaaaaatcagaaataaaattaaaatgattcccacttaaataaacaaatatagacattattctagaatataaatcaagaaagcctaaattggatagattgtataaactcgctaaggaaagcatgcaagccttatccatcctttattatcactgcgttccacagtggctgtggcctgtcccagaccagaaaaccttcagatcctctttctaaacaaaagcattccttatgcaagataaggacaaggtaaaaaccaagctcttcagccccagtcagattcctgcttggaacaaagattaagatggaaagggtcaaatttcaataatcttctgccctttaaggttgattcctagcaaaatcaacccagttttttccaagcattcccctttaagtgcccaatagtaataaatatagcaaagcataagtatacttaatatataaaacaaaccactcactaagaccaacattaagtccactatgaaagaactgtacctacacaaataggtgatgataagaatataagggatttcatttaagatctactggtaaaattatgattaagacataagaaaggaggacttcttaatattacttatatattcaaagaataatatttgaacagaattgtgtagaaggacagctggaaaggggaatagtggccccaaatggatgtaaacagcataggagagaatttagtttctttaaatgagttctagtttcctgaccgtggacaaactacttctcagatactgagacatcttccaagtgagaacattgaacactgagctcttttttttttttttttttttttttttttttgagataagtctcgctctgtcaccaggctggagtgcagtggtgcgatctcggctcactgcaacctccacctccaaggttcaagcaattctcctgcttcagcctcctgagtagctgggattacaggtgcccgccaccatgcccatgtttcaccatgttggccaggatggtctcgatctcttgacctcatgatctttgggaggcccacactggcctcccaaagtgctgggattacaggtgtgagccaccacacccagccaagaacattgaactcttattggtgatgtttgaagaatcgtggggaacctaaaatttgggagactggatctatattagcatcagagaaaattttcattcaatctgaactgatcaaaataaggatagctccctctccttcaggaagcattgagcatgccagcatttgcaaaatatatacccgaacttgaattgcaagagcagttttttcctttttggccctgaaaataacttacaacatccaagaagactttaaacaatctatcttttacctattgcacaatttgttattatacaatagggggcttattgttattattgttgtttgtaatggtatttctagggctttctatatttcaaatgactgactcttaattctgtttagtgctgaatcactgttttcctctttcgtttttcttttaactggtaaatattaacttccttcatacagctctgtcctaagacaggtacagctagcttattggtgacagccggacatgcttgcactgaatgaccgatggtttccactcttcttctttcctcctctttcctagtagctcagttcaataaggttaagcccttttctgatggtttgagatacatttaaaatgaatttcttatatttatttttctggtgaaataatatgttatcagggaaacaatagggatttggcttttaaaaattcatcatagtcttgttaaaaaaaaaattattcaatggcacttgtgaaagcctggtaagggagactttattcaggaacactgcagtaaacaaaggaaccaccataacagggtcttgcattgggagacagagattggactcatctcctaacatagcatgggcaagtgagaatttacagccaaggagcagggtggcggtcagtggatggaaaattactaagaggaagcatcaccagtagggaaattttggctaaactgacctaaaagtgctcttgctgaagacaggcgagggtgatcaaacatcacttggagaatggtggcagataagagatctgatccgctattaagggtgatcagatatcgaggatggggagttcttgctaaacctatttagcagggctctttgctaaaattttacaaaactggattttacaaggaagtgcacccatgggcctatgagaaggttcagaagcttgactaaactatggacaaggaaaaaaatcttcattggtccttactgcctttttaaagaaacattggacttcatggccactagtgagggtttggatttaactaatgagtatcactagaaattggacatgcatgagattcaccatccctgtccaccacctctgctgattgtcttaataactggttaattttgccacctctaaaatatctttcctgcacatttcttcattgtatttataatttgaattatcttctttgcaactaaggcatttcccaatttatcacctagtaatctatactcatcttgcatatcctttcgtgacctagattatgtgtgcagtatatccttcataagctcttaaatttaaaggatattttatattttacaaagctttttcccattttggcctggcacagtggctcacacctgtaatcccagcactttgaaaggccaaggcaggaggatcatttgaggtcaggagttcgagaccagcctggccaacatggcaaaacccgtctctactaaaaatacaaaattaaccaggcttggcagtgtgcacctgtattcccagctactcgggaggcttaggcacgaaaatcacttgaacctgggaggcagagtttgcagtgagctgagatcgcgccactgcactccagcctgggtgaaagagcaagactttgtctcaaaaattaattaattaattaatatttttaaaaaaacaaagttctttcacatctattcccatgccactaagtcaagagactaatttttaagacttcgggaaagatctatggatcccatccatgctgacttagagcataagcaaatagttcatttaaacagcaaccctttaaccaggcacagtggctcacacctgtaatcctagcactttgggaggccaaggtgggtggatcacttgaggtcaggagttcaaaaccagcctgacaaatgtggtgaaaccccgtctctattaaaaatgcaaaaaattagtggggtgtggtgacacgcacctgcaatctcagctactcggcaggctgaggcaggagaatcgcttgaacccaggaggcggaggttgcagtgagccaacatcaagccactgcactctagactgtgcgacagagcaagactgtgtctaaaaagagcaatccttggattttgtttgcaacagctctagactatttatcaggaaatcactaccatcaaatatttttccagttccagctaggttcaggtgttgccaagaagtttctgatgaagtgggctacaggagggaacttacttctagatgttatagaactattgttgtaagatgaatttatttaggtgggcaaactgatgagaccaacatgagtaacaccaaatgccgtacaccacgcagatgggcaagtttcatgttatactggggactcatgggctcattacacccatcttttgggccatttttatgtctcaaatatcagtttttattctgttgtcttaacttatagccactgagataactccctactgatatttagtttccaagttgacctttacaaggctgccttaactttgccccttaacatcctttatcaaagcccattacacgaatcccacatttgagatttccaaaataagacaatcatgcatagcttttcctcaggaatggaacttctcaggacaagtctgacgtgtaccctagttattaaatagatagggaaacaatcagaaaaatgacaggggaaatttcattctaatagacactgggagaaaagatggcttatgttgacttaattctttttaaaatactttactgtgtgtgattagtatcctaaggccttttaaaatacttttcagtatactataaagatgccagagggagttataaggagctatgggctgggatttgattgaaaaagtccaagtaggtcaggcgtggtggcttgtgcctgtaatcccagcactttgggagggcaaggcaggcagatcacttgaggtcaggagttcaaaaccagcctggccaacgtggtgaaaccccatctctacttaaaaaaataaaaaataaaggccaagtagagaatacgagtttgagccatatgaagtttccatttttgtagatcaaaaataactgcatagctacaacttcaaaggtttagccttaggaagaaagattcgtgaacaagtcattaaacagggatggtaggagtccatgagaagaatgaaagaagctccagatgctttttggttggaaaaaaacaaaaacaaaaacaaaaacaaaacagcagaaaacatggtgaaaatgtgttttttaatgaaatggttgtaaacaaagtgagtatgccattaaacaggaaaaggcctattgctttgtactgataatcttgtactgtgcttgcgatatagaaatcaacgctcctcttatttctctttagtcttttttttttttttaatagacagagtttcgctcctgttgcccaggctggagtgcaatggtgcgatctcggctcaccgcaacctccacctcctgggttcaagcaattctcctgcctcagcctcccaagtagctgggattacaggtgcccaccatgcccggtttctttctttctttcttttctttcttttctttctttctttctttcttcctttctttccttctttctttctttcatctttagtagagacagggtttcaccacatgggccaggctggtcttgaactcctgaccttagatgatccacccgcctcagcctcccaaaatgctggaattacaagcatgagccactgtgcccagccttttcttcagtctttctaatgagaatagtaaccaaccatctgtaaagagaaagagaaaaccaagattagggcataataagcagtaaccagtagtttgtccctggggagggggatgtggatggggtgtttggaaactaggacttcccattttttttcctacattgttttccccctcaagcacaggttacttttataacaaaagaaaaattgaaatgtttccttctgaactgaaatgagaaaacttgcaacaagagcgacagattttaattccttttgatctgaataaagagagctataagcactaaaagaagtttaatatgaagtaagctcctcagtgtgatgttgcattttttgtatgatgcatttgtatccacccttcatccaattcatgatccatgaactgtaaatatgtcagtatctggcaaggaaaatctgggcttataaaaggaacctggcctccttatttcaggctgagagcagggattgagagaagatctgagatctcccggtggcgtatggcacaaagactgtgaaggttatgctagaaacactcttatttggtgtctatcttttcagacaataggaaataattgaattggaaaaatgactaaacattgataaggacaaatcaattttgcaaatgcttagattctctaaataaattcatgtcactgcatgctgtgcacattaggtcccagagcagttagagactgaaaataaaccacatattgatatttgaggaatgttagagaacaagagctactcaacgtgttgagacaagcaaagaccatcccaatttttcaagtttctgcaaaccatacaccaatcagcttgatcttatcttagaaaaagactttagaataaattgttcagatgatcttttgtgaatgccaaaaaataaaacatggtaccacttagaccaacccatgtaaaataactttttatttttgctagattcattgataaacgaaattcagtacaaaatgaatctggatttcagcagagcatttcaaaaggactctcatcgtagcttatgaaaacattgcagaaaggtggattcaattcagtgacaatttgccaagacatgttttattctaatgtcactgtcttactttatccaataataataagaacttgatcctaaattcaaactgaggccctggataagagatgggctagaggggcagataggcagacagtttggggcagactcactggacagtcttttctgcagatgctcagagcatctagagattgctaggaggagacagtattgttaacttggactcaaactaacaagccatacttctgaagctaatattaaacctgaacctgaagaattccctcttccaggcagtggcggtcaggacatcattatggctggagtagaaatctgaacttagaaacaggcattcaaaagcaggaacatactgggcgcaggggttcatgcctgtaatcccagcactttggaaggctgaggcgggcaggatcacctgaggtcagaagttcgagaccagcctggccaacatggtgaaaccctgtctctactgcaaatacaaaaattagctgggcatggtggtggatgcctgtagtcccagctactcaggaggctgaggcaggagaatcgcttgaacctgggagggggaggttgcaattagccgagattgcaccattgcactccaggctgggtgacaagagcaaaattcggtcaaaaaaaaaagcaggaacaaaggatatcaatacagggaccagaaaacctttgagcagtggtagaggttgcccctacaggaggacaaatgccacctcactaaatagggacttagacattcaaataccagcacatttcctcttcagggcggagatctctgtaatcccagcactttggaggctgaggcaggcagatcatgagttcaggagatcaagaccatcctggctaacacggagaaaccccgtctctactaaaaatacaaaaaattagccggccgtggtggtgggcacctgtagtcccagctactcaggaggctgaggcaagagaatggcgtgaaccccggaggcggaatttgcagtgagtggtgatcgcgccactgcactccagcatgggtgacagagcgagactctgtctcaaaaacaaacaaacaaacaaaagaatagtatttaattatatcatcaggcagacatgacctggaaaatatggactatactcaaaagaagaggatggctattccctatcctgtactggctaacagataatttgatcgtgagttaggctctgatcatgccccttttaaaggaatattgaataattggaaagtcttgcaagtagagcaactatcctgagaataggactggaattcaagtcacataatgaaaaatgatggtatccagtgataattatcccagagaaaagaagatctttgggggaagggaaagacttaatgtagaagatggattagatgtgtcctgtgtggccttatagggtcaagaaacaagacgaccgatttaagcaaaaataagtgaaaagtcattcctggagctgactagagagacacatgttttcttgggaagtcgtgtgccctattctctggagacaggaaaacacagacaaaaaaactaatagggatgtcacagaatgcttgcgtaaataaatgggtaatttgatcaactgatatgcaagattccttaagtcattaaggatttatgaaggcatgtctcatgcctgtaacccagcactttgggaggctgaggcaggcagaccacttgaggtcaggagtttgagaccagccttggctaacatggtgaaaccccatctctagtaaaaatacaaaaattagccagttgtggtggcatgcacttgtaatcccagctacttgggaggctgaggctgcggctgcagaattgcttgaacccaggaggcggaggctgcagcgagccaggattgcaccattgcacttcagcctgggcgacagagtgagactctgtctcaaaaaaaaaaaaagacttatgaaagcaatgatcatacaagttctgaccattgtcctgaattttaaccaaggtacccgtcagagtaggaaacctacatctcagagtggttttgccattaccaaagccattcttgactttagttgttttcaaagtttacaccacccgatttaactgccattatccttcccattggctgttttcatcagtttccaggcaattccacccatttatttgtgggtcactgtctttcttttctcctctaggcctgtctcttttttttagtgaattcaacttccataaggataattcatcaaacatcttgatctctcagttcgttgacctcttcaccagccatgagttttccccttcctccatcccagtcactcattaccagaataatttcctgatcctcattatcacaaaaatggaaccagatgagaaactaaccagagtatttctttccataagatttattacacttagttaacaactttctgccaaaccatccttcagagctaaagggaataccatatacagtaataaggaaaggatgtttccttcccaaagacaggaattgttgcaaaactgatatatttaaaaccccagaggaaaaaaaattgtattcttagatttggggaaacttgtccctacatagaaagcctccaggtgattctagcccatagccatttggatatttccaaccaaagtccaagacatctcagattgtagacaagctctctctgctgtgcactggctgaattcctgacccacagaatccacgagcatattggaaactggagaaaggaaaattcttgctatgcagtggcagaaagtactctgtcatccgcagttttgaggcaaaagtagaaaggttcctggtgaactgagtgatctaactaaggaaatttccaactaaagtcttgaaggtgttctttgatttcttcttgctgactataataaaatgtgagaagagaaagataaattgagagaagggctgattaaaaaaaaaaaaaaggatcctggacagtattgtttgttttgaaaattctcagcctctccaatggcaaataatgctaaagtttaaaaatgacttctaagcaaatatcaaattgaagacaatgccagagaaattcagatataccagaaatcatgccctaaagataaagctaacgtgtggctataagattttttaagatctgagaaagtcaaaaattagaaaattattttcatttcaaaaatgaaaaatggggaacagctacatacaaaagcccctctaaagatattaagcgaggccgggcgcaatggctcaagcctgtaatcccagcactttgagaggccgaggcgggtgatcacaaggtcaggagatcgagaccagcctggccaatatggtgaaatcccctatctactaaaaaatacaaaaattagccgggcatggttgtgggcgcctgtagtcccagctacttgggaggctgaggcaggagaatcgcttgaaacagggaggcggaggttgcagtgagccaaggtcgccgccactgcactccagcctgggtgacagagtgaggctctgtctccaaaaaaaaaaaaaaaaaaaaaaatattaagtgagaacctcacagacactctcggataagtcaaagaggcttctaggaaacttaagggcattgtcctcagctattacatcaggggtccaagtgtttatctctagatgatctgtggtagtaacttttgtctaatagagtaaactccaagaagattcacaggagaaccacaaattttttctaaaaattatatatacaaacaaattgccagcttgaacagaggcatgtctcacatggtggcagacaagagaagagagctagtgcagggaaactcccctttttaaaaacatcagatctcgtgagactcattcactatcacgagaacagtgtaggaaagacccaccctcataattcaatcacctcccactggtttcctcccatgacacatgggaattgtgggagttacacttcaagatgagatttgggtgaggacacagtcaaaccatatcattaggttaggctgtaaagggactgtgacttatatatatatattatatatatatatattttatactttatatatatatattttataatatatattttatatattatatatctattttttatactttaagttctagggtacatgtgcacaatgcgcaggtttgttacatatgtatacacgtgccatgttggtgtgctgcacccattaactcgtcatttacattaggtatatctcctaacgctatccctcccccaacataccaggccctggtatgtgatgttccccttcctgtgtccaagtgttctcattgttcaagtctcacctttctcttcgcttcctctgggagaatccagatgctgtgctatgaggacaatcagccagagtatggagaagcccatgaggcaatgaactgatatctctggctaacagttggtgtgaaccagtggccttccagtgtccacataaatgagcttggaagtgaatccttctctagttgagccatgagatgaccgcagccccagccaacacctcaccaaccatctcataaaagaccccaagctgtaggtatctagctaagccacatctagttttctaacccacagaaacagtgagataataaactttgttgtttcagccactaagttttgagataattgttatgcaacaataggtaactaatataatgaaacaggtccatgtatcaaaatgcatagttcttaaaagcaataatgaaatttaaaaagtaaattgcataattttacatcacatacataaattcttaaatctgcaatccttcatactaggtcttgtttaaatactttataaatataagatgtttatatttttatataaattaacagtgactgggagaatatacaataaaattatgatagaagttatatctgagatgaaaaaagggaaataagactgaagaggggacttcaactttacaagcataatgtttcatttcaattaattttttaaagatccaaagcagaagtaagaaaatgccaatttggagaggcaggttcttgtaatatttttctcaaaattttcttgtatttttaaaattgttccctgccctgaaaataagtgtaaagaaagatttagttacatgttcaggcttggcagaacattgcttattagaggagattcagatgttttatggacaagccctagcaaacttaaaaggagaaaatacatgctatgtcatttaaactgttgccaagcatggttaaagacacaaagcttctcaactcatgtttcacatttgacatgtttagaatgtgaagtttgcatgttggcagatggccggtaaacacacttgcctataaaactgagaaatctgtcattgggacaacaaaaactatgaggtagatgggtaaaaaaaaaactattataaaatgaaatttgaagtttcaggtgtcttgagaatcctggtatcaatcaacaaattattaaagttaatataactcctaaacaatgtctgcatcctcttgtaagaagcattcttgaaaagtctatgcaatatgagatgaggtgcatctgcttcccagagccatatccttcctctagcatgatggaaatctccatggaaggtgtgggagagagaatttgaacagggtgtccatcaaaatgtcatttctggaagacattctatccacggtaattcctttgtggtgtcaagttccctctctctccttcttcctttttaaaaaaattttcttttgggaccttagttataaataattgaattattatcatctgtgatttttgcatggtccctctcttatttattttttatgtacttataaatcagttaatttacttcttcttctccctttactcccttcgtttcctataggccactatgctattctgtctaatgtatattcaacgcatattaaatttatttaatggatttgtatatatccttataaagtattgttcagtacacatatactttatgtaaatagcaatcagtaatatatctcattctggtttgtcattaagcagaatttttaaaaatccatctatgctacagtgtgtatatgtaatctattgttattaattcctgcatgatactccatgaagaggatcaccgagttgcctacccactttcacagtgttggacaccagctttcctttgacgtttttgccaccatagggatgctatagtgaacatccacatgtacacctccctgaggacctgtgtgagaattttctggaaatacacactcaggtgttggattgctggatcatggagcatcacttacataatttacataaatagtttcagattgttctttagagtggccaaacaagccaacaatcccattagcaatgcaggaaaattcctgtaaattcccactcccaccaacacttggcattatatagcacaggagtcagaaaactatggcccattgatacaggagcggggcagggaagtgctgggagaagaagggtgggtccctggtgaggactccacccctactgtgcccacggacctagggaacaggcatttctgaatgaataagaacaggcatttctgtttttgtgcccaaacgttgcatttcccaaaaccaccctggcccaccacgccctcatcctgtgcctagtgggaagagacacaggcagctggacatccgagaggagcaaatcgtcagaagagcacaccgacaggcagcggcagacgccagcaggacggcaggccatcgacagggggaaccatagtgagtttgtcgggggcgggatgagggaagcctggctgagcagcccaactccaggggaaaaccaccttcccactccatcccccttctggctcccccgtctgctgagagctacttccactcaataaaaccttgcactcattctccaagcccatgtgtgatccgattcctccagtacaacaaggcaggaaaccctgggatacagaaagccctctgtccttgccataaggcagggggtctaattgagctaactaacacaacccatctatggacggaggctaaactgaaagagtaccctgtacacacacccactggggcttcagctgtaaacactcacccctagacgctgccgtggggtcagagccccaaagcctgcccatctgcatgcttcccctagaagtgtgagcagtggggcacggaagaagcgagccacgcccccgttgcacgccctgcgaggggaacaaggaaactcttcccgtctcaccatgagccaaacagagccccagcctgtttttacaaagttttattagaacccagccacactcatttgcttacatattgtctataaatgtaatgatataatgcaatgatacaacggcaaaattcagtagttgcaacagagaccatgtgccccacaaagcctaaattatgtatatctgtccctttacaggataagtttgctgggctctgatatagcactctattttttgcaaatctaatacctgtaaagtaatatgtaattgttattttaattttgaaatctctgagaaataatacttttgagaattctttcacaggcttacttaaggattcatcttccgtgaagttccattcatgtctcaagagaggttttgcacagggtgtccacccaaagatcgtttctgggagacattccatccatggcacttcctttgtgatatcaagttccctctctccccctcctcctttttgtttctaattttctttttggacctcaaaattagtcaatcacatttcttattttatggcatactaaaaagatatccttccaaatctcttccccatcagttccagaagtacaagaggcttcagttttaatcagtttgagaatatttagaacctcacagaacacatcaacaaactcacaagatcatgtaaataaatgagccctcagaggtagaataaactaacttcttcgtgttatagattagcaccctggtgttacataaggtcatacagtaaataagtggccaggatgcaactcaagccttctcctttgagccgtggtctagtgctttttcctcaccaccaccatagaagtcctcctctgagttgcatttccaagcaggtcataaggcaaatgcccatactcttgtccttcagtgaccttgatgtctcattattcccgggctcttttggttagttttccttcatctgtaaggttttttttagaatgtcccacacatattggcaagacctatttaactactgagaacctcaaatcacagtgattgagaggactggaacgagagatgctcagccagtgaccatcaggtaagtttatgagcagatcctaaggtccctcctcgggttggggagaaggcccgatctgggagaaagtcagggcactggtcataaagacataaggacagaagtccaaccatttaaactgggacaggagtcatccaaagggcaggggggaacaagagggtgatatcagctgggccagttagatggggaaggctaaaatgctaaaatcagtcttttagtgcactttactcaggtttggctaggcatgttttataggcaattgtaaatcatggagcaaataaatcaaccttaagtgcagccatacaactaagttgaaatgtggtgtgtgtctgtgtgtgagtgtgtgtgtgcatgtatgtgtgtgcatctgtatctgagtgtgtgtgtgtgtacctgtatgcatctatatgtgtgtgcatgtgtgtgggtagaaaaggtactgaaggcaatacccatacatagttagaaataaaaggaaaatacccattagaagactagaacagatctagctacttgaactgttgaaatgataagcccacctatatctagggattcaagaagcattcaatgcttcttgaattcaattcaagaagagattcagtgctgacattagtcaattcaactgcaggtagaaattctccacctggacccttccatgttcaggtgctagattttgttcttatggccatccccctcttttttgacccagaaccttctttcaagactacgacccttgtgattctaaaactggggataaaacaattaatagtctctctacagatccaaagtatacctcagtgacagaaaaatgtgaactatgaagatttgtttgctagttaccaaattattgctgctcacctacaggtacacccttcattgcctgctctatgataatacaaagggatcctatgaatatttctccttagccagctgacacaatgtcccaggcaggagaatcgcttgaacccaggaggcagaggttgcggtgggccgagatcacgctcttgcactccagcctgggcaacaagagtgaaactctgtgtcaaaaaaaaaaaaaaaaaaaaaagaatcttaaatgaattaaccctaagctattctctatggccaatacctcatgtttgttttcatctgtggctttccagaaccatttttgttgttggcttcctgtctactcactatagggaaaatgagcccactcagctcaaaagaactcttggtggtgaaaattttggaagccagtgaactgtttgcccttactctcgtccagctggagaatctataatcctagacactagctacccttgcagaccaatgcagacccactgacttagatgactcaggctcattgtgttcaaatgtgacctgaaggaaatctacatagaggtgtgtgtaggaatgaaagcactccaggagtcttatttattatacttaaccagtcacatttttattagcagctggcagcaacgaggtcttctgaaagaccaggcagcatcaagaaagagaaacaagagagggtttgctaaagtgaaatgaattgacatcatcaggaaatgcaagcagcagtgtggtagtccatggttgctgaaaggttattctcggttaagaaggatctcttcgtgcctggacaagttccctggtcagcacctggagagaatgtgaaggtggaatcagggtaaagttagaaagcaggcagcatttgtactcggtgggaggcaggcacccagggatggctatgcatttatagacagccgcagaccctcagaggaggtgtgaagagggctccattaacaaagtgttgccttgcagaagctggactcacagctgggttggcatgaagtcggcaagcaattggagccactactgggtgatgtgcctaaaccagtcacacagcaagctgatttgcagccactctggttataggaagggggtccatcacaagttggttggccagaaatcacagtgtcacaagaagctggtttgcaacagttctttgtggaacaaggggcctggcagttagccactggctggtagatgaagcatgtggaaggaaccagttggcagtgaggtggctggcaatgggaaggcacacagcaagtagtattgcaagaactgaacacacaagtcgatggctggcagggaacaggcatgtagagggctgattggcaaggcttgaaaatatagcagatgggttgataataagttgatttacagggctggccttcaccactgacgggttgacatgaacttccttggcaccaagttggttggcatggactagctgtacagatggttggtaggcaagaagtttccggacaggaggtcacttcagagcaggatggctggcaggatccagcatcacagcagactgattggccacaagctgcctgacatgatccagacatgcagacagattcctggcaggagctttgctggcagggactggcatcgcagcacttttcctgacaacaagtagattccgagcaggatggctgacatgagctaaccagacaaggagactgaccagtgccagactgatagcaggctgcgtgggagcacataggttggcaaacaaaacccacacaagacgttgctggaaggcgggtaggttgacacgaagcaggatcacagccacttggggcaccaatggatggctgacagctttcttggcatgtgaccagttgccacattctgctgtggcaggaactaggcaaacagagagcatgtcgaaatccacctttaactgggtatgtggtgatggtgggcacagctggaatggctgtggtgtttccaggacaacagccgtctgccatggtgctggtgctgaccttgctgggaagttgcaagctcagtatacctgcattggaaagacatccgatacagaggggcttttatagtccttcactaggggtgttggcacgccatgcagcatctttccttgttattgtttttactcatttgcatgcaaacatctgattagcaggcttcaggagcctgggagatgtttcaactttgaaaaggtgtctgttgagtcgggagttttctgcgctgcatttggattcgttgacactgctcctgctcttggatgagctgtctcttttacaggttgctctccagcctcactgaagcaggcctttcctggcactaacctttcatcaggaggcctctgccaagccagagtggccctgctgttcctccaggaatgcagctttgcaccattcaatcagaaatgaagccttgacccagtttggggagaggatgtcaagacgggaaatggaaaattagtccaaggaacccagggacacttaagtgcctctacctctttttaaaaccttcccatttatcattcctgaaacttgtttactagtactattactaataataacaatagaaatggctttcatttattgcatagttactagatcaagtccttggctgcatttttcactggatcctcacaatgacttcagtaagtataattgtcatcactatgttagaagtggcaaaactaaaaaaaagtaataaataaagaagaaaccaggtttaaaacaaagttaagattaaaatataaaacttcattggcccttttaggaagcttaaaatctcccccaaattggttcctctcaagatttttttagaacagaaaagaagaaaacagaagtggcaaaactcatagagtttaaatcatgttcccaaaattatgcaaatgaaaaggggtagaaacaaaattcaaacctagctttgtctgaccaccaaacccctgatcttaaccacctattagaccccctgactttggggaggcagggagaaggcgacactgatatagtggctgcaggctgacacccctatggcaacagactggctcgtgagcaggttgcccaggccccatcctggggatcctccgcccactccagtgactgtaatcagcagctagaccacactggtgtgagtacttacctctacttatcaatacactcaaacacagtcttttaattttggaaattttttaaactaccaaatatttcatcaggaagtatcaaacccaccctagggcatcaatagcatatgaattctatacaaataaaaacacgccagcagtgataataaaaaaaatcactgtaaagtggtgttaatgttaaaccaatcccttccaagaggaattcgtgagggactttcttggcccttctgcttttcctccgggcttgtcctggctccgcatcaccaaccaggtccggtgttctacaccagccaacgttctggccggttcacgctggaggcacatgacggagtggaaagatcacggtgtggggagccagatggggctggccttgatttctggctctgccactaactcattctgttgaatatgttagctaattacctaagtcttcaaagtatggcgatttcatcaactgcgttgtcatgtctcaggttagttttttgtgggtgtttgtttgctttggttgcttcacaaattattgaaaatactgaaaacgctgaagggtactttgcaaacccccagctacaaaatgccttctccttggcaccctcttcacctccattttaaaaagaagagaaacatttttgatcagaacaatgtctggaaaaccttctcccctgccattgaaatgcctttttccccacagttggtttctatgtcacaccatggatcacttcttttgccctccttcttgtctgtattcatgttggcatctttcaatctgcaggaatccatgcactgtgttttattgctgaatatttacccccaaagctcttcatcttcccagaggatgtatttaatactttcagtcttaccaaatatgtcaatcaaactgggaacatgagcatgtttgaaaaatcacatcaacttcagtccaatatcctataccacttttatagttttaaagcaatccattctacatccatttttctctaagtgattctgctcttgttttcttttctcctaaaggaaactcttaatagcaagaacatctgtcttgctgtagttcaaggcactaaaaacacctagtgtatcaacaaagacacctgtgaccacattgagacatatcatgatccatacagaacctaggctttggaaagaactgggttttagtcatttgcatgttacttattagccatgacaatcgtgaattttatcactccctttatatatatgtgtttgtgtgtgtacatatgtgtataaatgcatgtatactcatacatatgtgtgtctgtggtttttgaacaatacacacatatatgtttgagtgtgtgtatatatatacacacattatattaatatacataaatatatacacacacgtatggttttctggagcttgtttatatcaatcaacactatgttagtaagattcatccatgctattgcatgtcgccattttccagtcatcttcacagtataatatcccattgggtgaatataccacaatttaattgtccattgatgggcacttggattgtttgtccttcgaattctgcatcttatgtataggtgaaaaaataggagagaatacatattacttcaaagaattgctgtaatccatatgaaatgcttagtccagtgcttggcacagaggttcaaaaccctagccaactcctgtgtgtgtgtgtgtgtgtgtgtgtgtgtgtgtgtttagacagaatctctctctgtcgcccaggctggagtgcagtgaagtgatcttggctcactgcaacctccttccagattcaagcaattctcctgcctcagcctcctagtagctgggactacaggcgtgcgccaccatgaccagctaatttttgtatttttagtagagatgcggtttcaccacgttggccaggctggtctcgaactcctgacctcaggtgattcacccacctcggcctcccgaagtgctgggattataggctttagccacagcatccggctggccaactcccctcttgactctggaaggagacaatgataaatcccaatggcttgatgagacagtaactccaacaccaatgtgattaagttttgcttttgactttctccctctgccatagtctgacccagtggttctcaaacaggggtgatttttgcactcccaggcaatgtttggcaatgtctggagacatttgtgatcatcaccctcaaaggatgctactagaatctggttcatagaggccagggatgctgcttaacatcctataattcacaggacagcctttacaacaaagaatcgcccagcccaaaatgtcaataatgctgaagttgagaagccctggtcgaccctcacactgtgctcatgatgactcaagctgccccttgaggacaaggaataggcctccattctgtgcactaagtgtagggagtgactgctttgaagagactctgtccttggattttgtaagatacagaatttatcctatgagtgtcttggaggaagtaggagaacataaacaaaattctcacacaagaaatccaagttacccaaccttctttgttgtaagtatgatccctgatccccacttgtttttcttcctgtggacccaaaaacaattggcttcctttcctccccagtctctctatatccagaaccatgttcttccattgagttctccacaccaaccaaggccagagggatgttccaaaaccagtgctcttcctgtcacctccttgcatgcagccccttgatgctttcatgtcagccctgcatcaaaccgaaatacctctgtctagcatgcaagaccccacatagacagatcactgtctacgacctgacctcatggctcattcctcaaagaacaactctcccatgcctcacctaatgaacaatttgccctcaagccccattcacttgtacaagtctcctttgcctagaaagtttttcctttcctgtttgtaactggttaattcctactcatactgaaagactcgatgccagtatcacattctccaataattctttccttgttccccaactatgctctgctgagttcatggtgctctatgcttatctccaagtacttggcacaaaggaatgtcataattgtcttgctgcccaccagagagtgagtttcttgagaacaaagactgagacttcttatgtttattcttagagctaaacacagtccctggcacctagctgctgtctaataatgccagagggatgggtgggtggatggatggttgaatggagctgctgttaaagaagaagcaagtcactgatgagactatggcattaatggaagagcaaggagaacagcaagttgcttcagcttagccacctttattggacagttacatattttacctgattggagaagtccctaaggaacacaagcatgcatagcaagggagcacatacatgatgacagaaaaaactacatgcaggaaagagacccgagatgatgtggcaaagcagctcttctcagcttaatcgtagcagaagacaagaacctggaatgtctccctctcactgtccagaaggccttcatttaagtgatcaggatactgacatttctgatgagttctttgaggggtaagccgattgtgagtaacaatgcagaaagaaagagctcctagctaagtcataatgagctttggggaggacagtgcagttttgtctctagctggtggcttgacttgcaagaattggggggctgaagccaatttagcagttggcaggcttgctggcagcaggctgagctgctgcggcctcacgggtggttgggctgatgggtttggcttcagtgggctggcagggagcctcttctgagacatccaccttgcagggggttgtgtcaacacaatccagttggctggaagtggattttttgcaatcccgtttgcaagagtcagactcagtgcaagatgggcggaagtagactgggcggcaagagtaggaagtgacacaggctgggcggcgcaggatggagtagcatgggcgatagcaggcaggacggtaggagatggatgtcatgtatggctgcctataggtgaggagtccagagcagattgggcggcagatcggacgggagaccgggcggtaggaaatcgtagcactgcaaggccgtttgctggaactgggtatgtagaaagtcctaggacaagttggtcggcagatggcagatgcagaagaccctggactgcaggaaagaggtcggcaggaggtagatgggcaggaaactggctcagggcagacagaaggacagcgcttgactacatagcaagtaggttggcatggactggacacacagacagctggtgagcaggggctgggctcagagcagatgggttggcagatactggagacacaacaagaaggctcttggcaagtgctggggacagaaggtggctcgcacgagctctgaacacagcagacagggcggaggcaaactggctcacagaccagagccacacacgtagctggctggcagatgctagactctgagcaacttggctcacaagggctggggtcacagcagacagcctggcagctactggtcacagagcaggtaggtgtcgggcacaccggctgacagcaggaaggctcacagaccacaggttggcaggaactaggcagggtgcagacagctgaacagcagctgggctcacagacaactggctggcagcagctggatttgcagaggacaggctggcaggaagtgggcacacagaggactggttggcaggaagtggcttcagagcctacaggctggcagcagctgctcacggagcaagaaggctcacaaatagcaggctcacagcacacaggttgagcacagctgctcacggaacaagaaggctcacaaacggtggcctcaaagcacacaggttggcagcagttgctcactgagcaagaaggctcacagatggtggcctcgaagcacacaggttggtagcagttgctcacagagcaagaaggctcacaggtggtggcctcacagcacacgggttggcagccgctgctcacggagcaagaaggctcacaaatgacaggatcacagcacaggggttgggcacagctactcacaggacaggagggctgacggcactgtggcccacagctggatgatccacagctgtcttgacaagtcaccagctgccatgtctggctctggcaggaactgggcaggcagatggggcctccacagctcacctcagtggagcagagagaggtggctggcacggagaagcatttcctagaagagcaactgccagacatggtggaggtggccgtgcttccttgtgctgagtgctgagaggttgctgcctcactgtgacagctccctgaggccctcacttttataccccctcactggcgtgttctgtttgggactcctgcatcttttcctcattgttgtttgggccagtttgcagaggaacatcttattataccaccgtttgttgatctggaagctgtttatctacccgtaaagaaggtgtttatttattgatgtgctaaatttggaatcctcagagctacaggtagtcttggaagaagcatcctcacctccaaactggataatctatatttctgagcattgtgaacagggaaagaagaatgaaacttatgatttatccaccttctagtcttccatacagggccctgggttggattcagaggatgccacaggaataagacctattcacccattctcttggatctcgccttctagtgggcagataagcatgcagacaaactcactgcaatacaataataagttcaacaatagacatacagagattaattgagaggagaggtgatgaactcagttgggaaaagaacaactgggctggattttaaatgactgcaccttacagcaatgatcttgcttaaaaccaccagcaatctcatgaggcagagatttttctccaccattagaaatgaataaatggtccaggaaccatggctcacgcctgtaatcccagcactttgggaggctgaggcaggcagatcacctgaagtcagaagttcgagaccagattggccaacatggcaaaaacccatctccactaaaaatataaaaaatagccaggcatggtggcacacacctgtaatcccaaatgcttgggaggctaaggcaggagaatcacttgaacctgggaggtggaggttgcagtgagccaagatcaagccactgcactcctgcctgggtgacagaggaagactctgtcaaaaaaagaaaaagaaaaaaaaggaaggaaggaaggaaagaaggaaggaaggaatgaaggaaggaaagaaggaaagaaggaaggaaggaagaaagaaggaaataaagaaagaaaagaaagaaagaagaaagaaaagaagaaagaaagaaagaaagaaagaaagaaagaaagaaagaaagaaaggaaagaaagaaagaaagaaggaaagaaagaaagaaagaaagaaagaaagaaagaaagaaaagaaagaaagaaagagaaagaaatgaagaaatgggggcagagggtcagaaagtttcagtcacttgctaaagatcacacacagtctgtccctgatctaaggcggctgtccctccttctcaccaacctgtctagacctacctttctcagaagacttcatcaaagtcacatatcgccagcttagcccaccgctgtcctccatgctatcccatgaacatagaacattggcttgacctgttcctggaaatcatgtgacccagcctttctgctcttcctcaagcattcattagacctccagggtcttccttgcttttaatgattttgacagttcctttaaaaaaaaaaaatctccaagacccaaagggtaaatagtaaaaacaagagacttctcaggtgtgtctctcaaagactttgtgaacaaaagactcgtctttgctactcttgagacagatgaagggagaaatgaatcctaggtttctgaattccaggacttaacatcttgctcagtgaagggcctagtttgcctccaccatgtgttttcatcaacacaaaaggcaggctctcgcttggaaaagctgagccattctgccatccattgtgccatccattcatccctcccttcatttattaattcatgcaatcattgactcagtttctcttttatttatgcactcaactcagccaacactgggttctgtgtgatagatacaaaaagagtgagttgtaattctggccacaaggagcccaagtttagaagagagatagacacatctataagcaagtatggtacagaatgcaagtgttgtgaaagagggatgcagggggtggatgcagcagagagagatagctggtatggagaggcatttcctagaacagcatctgccagacatggtagaggtggccatgcttcctgtgagtgctgagaggtcactgcctgactgtgacagctccccgaggccctcactttggaggcacccaggagagatattgacatggtttttggaggctgggcatggtggctcacacctgtaatcccaacactttgagaggctgaggtgagtgtatcacttgaggtcaggagttcgagacaagccgggccaacatggagaaaccctgtccctactaaaaatacaaaaattagctgggcatgctgacatgtgcctgtaattccagctgcacttgggaggctgaggcaggagaattgcttgaacccgggaggcagaggttgcagtgagccaagatggcactatgggtgacagagcgagactctgtcccaaaggaaaatttttaaaaggacatggtttttggggaattagagaagccttttcaagtaatatgaaggctcaaagagagtggacaaaaagggggtcataaaggcaggaaaaggataagatgtggaaatcaaagacatagagcacataacatttgggaagcagcaaatggttcaacatatccaggatgaaaagcagaggggataggagggaaaagcagtggggctagaggggttactaggcacccaatcatgaaaggtcttgtggaccatgattaagaagttgtatttttttaatgataatgagggtttaagcaggagagtaacttgatcagggttgccctttcagaaggatgtgtcccctctctctggatgtggagaagggaggttgagggcaagtctgaaggcagggagaccattaggggtctgtggcaatcacttagaagtttcatggcaacaacctgaattgggcaggttcagagacctgagagacgggtcatggtagttgaaaatggaggattaggaacagggagtgccattcttttaaatgtggctctcaagcagtgggcaaagaagacttttggacaggcctgcagaggcaaacacagaggagatgctgagacccttctcttttccattcacttctcttcctcagctaaaccagcagtgaatggaagtccgccccacaaacaaatttctcataaactctctcagccaagaaactcatccattgtgctggaatgtcatctcttcgaagaatccttccctgctaaatgaaaaggcaggtcattcaactatgtagcccatttctactttattcttctttatggctcttatcaccccttgacctcatataagcaccatgagggcaaggaccttgtctattcacagatgcatacccagcatccagagcagcagctgatacattggaggcacacgattagcatttattgagtgaataaatgagaacctctgtggatagctaagaagggcaagcctgtatcagtaattcaaaaatcactaccgccacacatgcatccaggaggcatgaccgtgcgcaatagaataatcagctgctctgaatcacaactactcagtgcagattcactggtctctggacaagtgtgtcccattggcagctcctgctttggcggtggctttgtcttaggggttaaagagccagttcctaggaagccagttccagccagagtgaaaatggctcaaatagtagagtccgaaactgaaccaaggcagagtcaaatctcaggttctctccaaaagaagacattaataatactgctgggttcataaatgaaagaaaaaaatgaaaacacaatgagctaccactatacacctgctggaatggctagaaataaaaagactgataatattaagtgttaccaaggacatagacactggaactctcagacattgctggttggaatacaaaatgctgtggccactttgcaaaacaactcggcagtttcacataaggttaagcattcacttaccatttaaacagccatccaattgctaagtatttatccaaaacaaagcatatgttcaccaaaaaaaaaaaattgtacgagaatgctcatagcagcttcattcataatagccagaaacacaaaagaatccaaatgcccataagtaggtgaatatatttttaatgtagtttatctgtataatgggatgccattcagtagaaaaaaaaatgaattattgatacctgcaacaatgaacagatacaaaacatgataggcaaaatgaaaaatagtgcatactgcatgatttcttttatatgaaattctagacatggtgaaatctgtagtaacataaagaacaggttgatggttgccagggtctgggggtgggggaagaactgactgcaaagacaaactgggaattttgggggtgatggaaagttccataaagatcttgagtgcagtggtggttacataagtatacacgaatgtcagatcacatcatactgttcactaaaaatgggaactttttattatatgtaaattatatttcaataaagttgaccataaaaaatgaaacaaaaaaattttttaaagaaaaaggtaaaagcaacataatcccagttttattcataactatgcttagaaaacagtctggaaagcttatcagtaatagactctgagtggtgagccttcgaatgctatattctttatatgtttctgtattttttcattttttagagttcattgctatgcttataatcagaaaaaaatttttctttgtcaaatgaaacatcgctttgtaggcataaaaataaatactatttttccagggcaagagcaaaattagttttattacacacacagcttaaggtcactttcaacaaaaggttgatcaactgtcttttgagttttaacctcccaggtggacccacacaccttggctgggccctacctagcagaggtatactcactccctcctccttagaactcaggcagaagaaacgtagctggttccaggtaagacaacctagcacagaaaagtgagactggaccaagcatgaggctggaagaaggaactgtactgcgcagaacatcctcagaaactgtgaattcactagctttgccattagaaatcctttccattcagaaccaatcttgttttaccaaagcctcctttccgactttgccagaaagttctgatcaagcctgaagccctcctgcagaaccatcctaggagagctgtagtgcagaagaaagccatgcccctcaatcaccattaaatgtggccagcatcagcattcacccaggagcttttaaaaatgcaggtccctagggactctaggccctagagctaacgggtaaaatctccagtgataaaacccaatgatctatatttttaaaagcttttcaagtgaatctcatgcagcacacggaagcttccgtctagatctatggttctcaaacttcagtgcataagaattatctaaggttcttgttaaaaacacagattcccaggccacactttggtggattctgattctgtatgtcttagggagggcctcagagtctccagttttaacaagctcccaggtgattccgacgcaggtgatccaaaaaccacaattcaaaaaccctaaggcagatgccagagtgaatttttctaacccagtcctcagcagggaggtcaaggaagaggcaagagaactaattaggttatgccagcatgctcaaatttattaagaggctcacaaagaagatggaccttttttgcatctcaaagctgcagaaagccagggcggaggatcagtcccaaagacaccttgaagaagaggatgtcttatagtacaagacattgaacttcatgtgaataagtaaagtattggggattcacccttgagcttgggatcacttagttgtgaccgagttttaatgtttcatcagagtatggctcttgttctcggtgccttgaaataccagagaaggtgttggagaacaagccctcctctacaaatcacagaaagacaagacactgtcttgggggtatggaaggttctggacacgaggggctgtccccctggagcagatggaggctttcggtgggactgcatcagtggtggagggaaaggtcttcattttgtgtcgcatataggtgtgggctggcagcacacaggcccacagcacccggagccgcagcaactggacccacagcaactggatccacagcagccacccccgcagcctccgcagcctccacagcctccgcagccagatccacagcaagacgatccgcagcagctgcccccgcagccagagcccccgcagccagagcccccacagccacagcaggagccgcagcagccacagcagcccggctgacagcagcactcttcacagcagttttgctcctgggtgcagcaggtgaagcagtcccccgggcagcaccccatggtccgggcccgtcagctcgcaggtcggtaacgcagccggagttccccacgactgacggtggccagccatctggatggcagcttttatatcccctcacccaggcatgagggacgggatgttttctttgttattatttatgcaagtttccataagaccggctcattaactggctgtttattttccagtcctgagtacctcaactcataaaaacgccccactcctgccaactgctgtttatccagagggtaaaaatacatcttcgaaaagacctgtcatcatggccaagcatctgccagctgtcattagcccaggttggagatgggaaggggaagccggccacagcttctggctctggaatgaggggcttgccttccacatcttcgcaggttggcgatggaccccatcttccatggatgctagtcctggaaaggcagaccggcaacagccgaatgctctgttccccctgacaccagtggaggctactgagaacgcctggtcacgtggctcctcccaggtggaaatggcatcctcatcccggttcatgtgagccaggcaaatgtttgtgtctgtgtgtggtatggggagtgtgccacacgtttaggcttggccggtgagcatcagtcatgagtaataactgccctgtgaaaccgagagagactcatcgtaaagctgcaagaagctggtaaggcatggtctgtctcggcggcaaggtgagctgaatattcgcacttctctctaaataggtgggaagaactgagatcagaaccctctacccacccccactccagccccaggcctttccttgaccggggaaggaagagatgcaggaggaggaagaagaggagaaggggaggaagaaaggaaagaagaaaagaaagaagaaagcaggaaggagatcagtaaatatccaaaatgctacattaaaatgggaatgtaacgcactttttttaagagttcgaaccttatagaccatctggcagaaggagaaattagaatacaaaatacccagagtgtcatcccaaggaataaaatgcctttgcaaggagtctaaaatctacagatggttcaggtccatgtgtaaattttgagatgggtcaaaatttctgtctctttcttggactttggtaccttgttctcctcttggagtgcccatggcagccctggagctggaatacaacatctagtaggggtagaggacagaagataggggtggggtgggaatggaaggagggatgggagtaaggatctggatcaagggatctagtccttcccttttcatttccctttctttgtaagatgggctagaagtaagacagcctctaagaagggctagaagaactaaggacagggtgggagtcgggagggtaaatgatgaatgagttacttggatctgatatgatactcaatacttcacaggatatggaattttagagctgggaggaacccctgaaacatcatctggtccagggttttatatcagaattgcctaaaagggggccttttgaaaaatacagattcccaaactgtattccagtccttatgataaatcagaatgtgtgcttatgagagcttgagaagctatatattttaaactttctcaggtaacttgggttacattaggaaacactgatataatctaatcctatcatgaccatcactgccaagcacttgtgttttacagaagatgataccaaggcccagagatgacacatccgtggtagattggacccatggcccagatgttctccctcctggtccactgtttcttccaccataccacatccacagatgggcacctctgagtgagtataatacagcaatgtctatggcagacgtgtccttttttgtttgtttgtttgtttttttgagatggagtctcactctgctgcccaggctggagcgcagtagcttgatcttggctcatggcaacttccgcctcctgggctcaaacgatgctcctgacttagcctcccaagtacctgggattacaggcacgcaccaacaagcccagctaattgctgtatttttagtagagacagggtttcgccatgtcgcacaggctggtctggatctcctgacctcaagtgatctgcccgcctcggcctcccgaagtgctgggattacaggcgtgagccactgcacccggccgacacatccttttacatatttatttattttaataagaggtcaagcattcccaggataaaaggtacaaaagagtagaaagtcttcctcatcttccaatgtctcaccattcagttctcctgcctctcacccaccccctcgctgctcccataattacttaacccctgtgtacctgaatttcttcatctataaaacagaaattaggataataatagtagcagtgtcgtagagctgttttgattaaatgagtaaatataaatgtatacatattgaacacttggttgtttgaacaacttgaaaatataaattatcatacttttatatttaacaattcatatactcatgagcatttactcagattaagtacaacattcagtgtgcaactcaaattatacactatgatttcaattgtgtaaatgtacatgtcatgatgaggacttgaagtcctcatggtggtgttatttttcttctgcaatttatttcactgttggtctttccacacaaattgggcagcagtagggactttttatatttactgcccccagggtagggttattactgtagaaatgcagagagaatgacttaggtcaatgcttagcttatacaattcaaagtagacttttgcaatgcaggagagtgggtggtcagatgaccaggtccatctagccgcctggatggggtaatgagaggatgtagacgtagaggatgtagttcttttgtggactaaaagaactctaatatcttggttgatgccatgagagggatgatagggccaagagtaagagagaaccatgtatatttcagcaaattcccaccatgaacctgttgccagcctcttgaaggctatgaaatttccatttgattcaaacataacacccctcaaagctcagacacctcctccagatgaaggttgggagggagaaatcctgaatgatttctgtgtttacatagaactgacttttatttttttcccccataaggtggaatgagggtttgaaataagtttaaacagtctcagaggaaaataaagttatatatttttaacatatcttagaacatgaattttgaaatttgtaactaatatatgttattatatatttatatatgtatatatctttatggatacttatctacattaatataaatatttacatgcagatatttgaaaaaacactaaaaggaaaactaaagtattagcagtaaatgtatttattgtggcatgataaatgatttttattttcttctcttttttgtattttttagaaatttgcagtgtgtaggtatgaaatttataatgtaaacattttattattattattatttgaatacagtgtcaaaggcaaatgaaaacctgggaacaatacaagtaactcatagacaaagcttgctttcattttctatttaacaaaggatttccatcaatcaaagagaaagaccagcaaccgagtagaaaaattgacaatggagatgaaaagataattcatggaagagggaatatgaatagcatttgagcatatgaaatattgcttagttgcattcacaataacagaaaagcagattaaaacaattccaaaatcctatctgttaccagatttgcaaggtcatatattttgataacacattatgtaataaggagtgaagagacagatagtctcacacattgctgatgggagtgtaaattggtacaacctttatggcaatatccatcaaaattaccaatgcaaaaactaattgatccaataatttatattctaagagtttacgacagggatatatcaagatatatataaaatgatgtaagtatacagtatctgttgcaacatggctccagaatcaacactatcaaactaccaacatcatttttaacagaatttgaaaaaactattctaaatttcatatggaaccagaaaagatcccaaagagccaatgcaatcctaagcagaaagaacaaagtggaaggtatcacgttacccaatttcaaactatagtgtaaagctacagtaaccaaaacagcatggtactggtacaaaaacagacatatacaatggaacagaatagagaatccggaaataaagctgctcacctacagccacctgatctttgacaaagttaacaaaaataagcattggggaaaggactcccgattcaataaatggtgctgggataactggctagccatatgcagaagaattaaacaacctctgtatttcaccatatagaaaaattaactcaagatggattaaagatttaaatgtaaggcctcaaactataagaatcctagaagaaaaactaggaaacatcattctgaacactagtcttgggaaaaaatgcattactaagttctcaaaaacaaatgcaacaaaaacaaaaattgacaagtgggatctatttaaatgaaagagcttcagcacagtaaaagaaactatcaacagagtaaacagataacctatagaatggaagaaaatatccacaaactatgcatccaaaaaagatctaatatccagaatctatgaaaaacttaaacaattcaacaaggaaaaaacaaatgaccctgttaaaaagtgggcaaaagacatgaacagacacttctcaaaagaagacatgcgagtggtcaacaaacatgtgaaaaaatgctccacatcattaatcatcagagaaatgcaaatcaaaaccacagtaagataccatctcacaccagtcagaatggcaattattaaaaagtcaaaaaacaacagatgttggtgagggtgtagagaaaagggaccgcttatacactgttggtgggaatgtaaattagttcagccactgtggaacgcagtttagagatttctcaaagaacttcaaatagaactaccattcaacccagcaatcccattactgggtgtattagtctgttcttgcactactatgaagaaatgcctgagactgggtaatttagaaagaaaagaggattaattggctcacagtttcataagctatacaggaagcatgatgcaggcatcttctcaggttctggggaggcctcagaaaacttacaatcatggcagcaggcaaagggtagctggcacttcacatggccagggcaggaggaagagagagagtggggagatgctacacacttttaaatgaccagatctcacaagaactcactcactatcacaaccaagggggctagtgctaaaccattcatcagaaatcacccctgtgatccaatcacctcccaccaggacccacctgcaacgctgggaattaacaactgaacatgagatttgggcaggaacacagatccaaattatatcactgggtatacatccaaaagaaaataaatcgttctaccaaaaaaacacacatccacttatatgttcattgcagcactattcacaatagcaaagacatagaatcagcctaaatgcccatcagcagtggactatgtaaggaaaatgtggcacacatacaccatggaatactacctggccataaaaaaaaaaatcatgtcatttgcagcaacatggatgcagctggaggccattatcctaagtgaattaatacaagaacagaaagctaaataccatgtgttctcacttacaagtgggagctaaacagtgaattcacatggacgtaaatatggcaacaatagacactggagactatgagaggggaaagggaaggagaggagcaagggtagaaaaactaactattggttactatgctcactatctggatgatgagatcaattgtaccacaaacctcagcatatatacccaggtagcaaacctacacgtataccccctgaatccaaaagaaaagttgaaattatttttttaattactctccagaaaaattgtcctcatttgtgttcacttcacagtgccttcgccaatattagttgttatttttaaaatctctttgtcaattgggtaggccaattatgaagtctcattatagtatttatttgtacttagtaattatcattgcatatttttataggccactgttatttcctttttagaaattatctgctcattctaattagctacccatctttcccaccttacttatatgaacttattttattatgccaggtatattaacttttcgttgtgtcactcacacatgttgcaaaatttgtcccagggtgtatcactttcttttagttgtgtctatatttttacgcacagaaatttctttctatgtagggaaatctttttttcctagtgttttgtttcaaaagttctcctccatccccaaatcagacaactatttgctttattttcatctattttatggttgtattttttatacttaatgctgctatccatcaggaatttactttggtgtgtggcagatactgctttacaaaaaaaaaaaaaaatcctagttttcctaattggggaacttgactgcctattaaatgaagtttgctgacaagatcctgcctctacaaaaaattaaaaaataaaaaatttgctgggtgtggtggtgcatgcctgtagtcccagctactcagaaggctgaggcaggaggatggcttgagcctaagagctcaaggctgcagtgactgagctcaaggagccatgatcaagccactacactccagcctgggcaatggagcgagaccctgtctctaataaataaaaaaaatagtttctgtacaagaaagaacagaatgtagagatcaaaaacgcaatcatgtcgtctgttctggcagcctctagtgttcatctcatgatattacacaagcagcttctagtgtttcctttagaagcactcacaagacaggctctgacactagattcaccagaagcaactcaacaaaaatttggtttgatgagagaagcttattatatttacatggaactaatttaaaccatgcatccaattaacgatctcttagcaaaggagacacattatcagtccctccctcatgccaggccctgctgtgagcactttatacgtgttttcttggttaatgctcaagatagctcaacacaagtattaatatccttattttgtgcatgaagaaactggagctcatggtgatcaattactttacccagacaatgcagagcttggatttgaacccagatctgtctgtttctgaagcccatcttccctcctctatgtctggctttctgagagaaccacagaaaattgcaaaggccctgaggcaggagcgtgattggcatgcttgaggcccagaggggaagtctgcatctggtctggtctggtgtgagcaggggagagcggcagacagctcaggggaagaagaaggcccaggttcaatgacctgaggccgttgcaaggctctagctgtcactcagaggagatggagagccagcagagggtcctgggtagaggaaggctcagctgtggctcaggcgttaaccattcactgccctctgtcctctgccttcaaccctcaactttttgcctctccactccaccatgctgggtggggagggctgaagttagggagcacccacagaggctctgatgctggccctgggacccaggagtgagagtgatgaggaactggctgcacacatgagtagggcagccggatctggccagagaagcaacacatgcaccctttatcttggacccctcaccctggctccctctgagttgcagggatgcccagctgggctgccagcggacatggggcctcactatgctgacatctacaaaggcactgatcgccttgggattctgcagtgagtcctcatcccttaaagcaccaatctcagctcagggatgggttttgcccttagaaaggcctttctgaggcaagatgtgtctacctggctccagccaacctccttttcagggccagaactcctccctggcacccctgcaggtccagcccatggtcgttgttaggccagaggtgcgtggcccatctagggagcgtggttcatctagggagcgggtgggaatggagagagggctaggtcaggcccctgggctctcagcagttctgtctccaagttagcacaagaggaggggggcagcctgagggtctggccctgtccactttctgagatccaagggttgtggccacagggtgaggggatgcttggcccagcctgggggcagttgtccggcagatctctgagggcccacctgcctgtcttcttccccattccccatggggaagggcatggggagaatgagggctgtggccctgggggaatgggggagaagatgggtagggccatgttctgggcgtctcacggtgagaccagggaagcagcagagcttgtggctaaaggccctggatctggtgctgggaaggaatctggggccaggtaggagcccagcctggagctgatccctcgggggtcataggatagagaaacagaggatcccagggaaggtggggtgggagtgagcttatgggctgtgccacttctgaaatgcaccccaaaggagccgatggtctggtgaggatgacagaaggggtggagccaaaaacaccaactcacctgggactcgtcagcagagtcccagcagagggagccggtcagtccccaaggctctgcgtggctttccagagactctgcttccagttggcttggacagcacggtgtgcagaaagtgatgggggagactgacttaaggcaggcgggacagtgggagaggacagtcaggcgccccaatcccagctgctgcagtgtctgggaggaggctgagggctgacagccaagggctccaagagccaggtgaggctggaggtggggcagggaagccatcctggccatctgtggggtcctcggtcacccatgtcacccttggcatctccccagcagccatcggcagcccaatgagagagcagacaaggcaggcatgtgaacagatctggggagtatcactcgggggttctgacaggacaaggatcaaagaagggccagggtggctggggaaacattcaccatctctgggttgacaggatggcagaaattggggaacaagcagggtgggtggctggagtgcagggagaggcaggtggatgccgggaggtcagaccctgtgagggcttgggaatgtcgggtgggatgggccctggatgcaccctgggtacaccaggcaagtctcaggccaggatccctaaacctcagcagggtgatgtggtcactccctgagggactcctgtcagggcccggctacccaccctgggtggcacctgtcccgtctcgggctgatttttctcagccaccctggccaggtgacctccacttttagtgaaggcaccttcctgtgtcgccaacttatctggagcctttagaatgtctctgctgagggccccacagaagcccaggactgaacggatacccccagggctacacaggtacccccaggccccaaatgagacgccttttatctccatcaacagaggacatcttatccccccgtggctgccctctgtggcctggagccacaccctctggctctgattctgtgcaactgactgtcccctccgtgagagtcctcctgccctcctgctggccaggctccagctgcccttggtgcccacagatgggtcgatgaagcccagatggcagcatctccccttcccatgtaccctggcccgaccccacttccaggagacgaccacgaaacccagcacccacccagttcttcccgccctctgtcatggcctcaaagtcagccttgccttcctagcacccgggcccaggaggcctccaggagcacctccggccaggctccagaggatgttcccatccctcttccccagggccaaggccgcatggtggggtcaccaggtgggagggtgggaggcccggtgttcatgggcctttgcagctgcccagcaattccagccgacagttccacatcttgggaacaggctctgatttcatgatgggctggaggcttctcaggattccacagcccaaatggcacaggggtccaggggctccaagaccaccaggagcatgtggtacccacgtcacaccccaagaccatgaggcacttggtgagtttatggtcccctcgactcttccctagaggcccagcatcccatggggccagaggagtcgggggtgctggagcccctcgtggggctggtgagaggctgagtcccagccagggcctgacctgggacgtggggttctccatgtactgggagttgggtttcctttcctgccctggaggagacagaggcacagggacaggggcccagctcctgcagagcagggctgagggcagtgtgtccactgggaatgcaggaagggggaaggtgttgtggggagccctggacaccacccagtactctgcacttggggaagggtcttcagagggccctagaagaaggaggtttttagggcaggctagggggccctgagcacctctgttcctcctgtcgggacacggaagggctatgtgctcaaggttcctcattagcttggcttctacagagggtgatcaatgggataaggaggcacagggagaccgtggctcagggaccctccttgccctgcagtgctctacttccccagcccaggggtctggctcacccccagcccacaggaggctcaggcaggtccctgtaggacacacaagcaaggccctctgcccaagaggggtcatcccccagcagaggccagggctcaggcccagcctcatggatagactgacccaggacctaacttgggagggctcagggaagccagacccagcctcctggaggggtcagatgaccctcatggggagggtcactgactctgggggactgaagccccagtgggcccagatccagccaccagcctccagcctggacgagccagggcctcccacacctgtgtccccacagatctctctcgggctcaccctaagcctgtggagggtgtatttggtagaaaggaacaggtgttgatgccaatggcacgcactgccttcaaggttcagaggagtaagtccacgtgtgcccagtggggcctgggaagctctggggtcagaccccgactggcccaagggcagcttcctcacactgtccccatgtttctctgctccagcccagaagaaggtctggcctggtgagcagggcagggcacagtgatgccgagcccatcccgcacgtgacccagatgaaagtcgggagtgtggcaagcacttccctgcccaggcctcccccaaaccacagcctcctgtgcacatctgcacccctgttgtggccacaaaatgatccggcaccacccagtgggagacgacagaggtggcaatggggtgtcggctctgacgcctcccagggaactttcctggcctgatcctcaccctgtccctagagcacctcatgaaggcttccaggtctggcctgtgggcgcgttttcaggaccagttcccccaaacctgggccctggacagtgatgcagttcttaggcaccttcaggcctctgtgctctgtaaggaaactaccaggaagcatggggacctgccacccccaggaaggctccaatacccagtccccccaccaagtcaccttctggggcagtcaatagtgggggagtgcctgtgaccccaaacctgggccttcctcttacatcttttcttcctcctcttcctcctggatgctaagtaagtgcaggaggcccaccggtcctcagggcaggcgctcagtgcgtgtgtactggtactcagtgctgtgcacacaggagggggatgtgggcaagaccctccaacaaaccccctcccactttccattgtcctgccctccccctcaaatggccctcaagggcattggaagagccaggcctatttgggggagcccccgcccctccctgcaagcactgacagactcagagagcagcagaggaccctcactcctgcacacccttccaagggtgccagaaaaacaagtctcgagccagggagacaagggaattggtgtccctgactcccagagcattcagggagagggcacgggtgggacccctggcccagagccagagccaagagttcagccagctgtgggaacagtcagtcccggcatggactgggcagcccaggagggcagaaagggccctgtgtccgggtcctctcacccactgtggagataggtccccatgtgaggtgacaagggggctgggtgacaaccaaggcccctcccacctgagttctgactagggactgtatcccaggcccaacagccctgggatgagggtggtaaggcaggaagcccccagccagcctgaaccctgggaggcagtcccagaaggcagtcccaggagccacctcccatgcccatacagctttcccaccccaggcggcacacactccctccctctgggatcagcagcctacaggcgtgtcctgtcaggccacgggggccacacagagaccctgaggactctagagacccaggcaggtggggcctgacccggaaagatctgcatgggctcactggagatgctgaccatatctgttttcctttcagccaaacctaagcaagggtcctcagcacccaggcctgagctggcttcaccgtgtggcaggaagaccctctgcaaggggagtaggcaggctcctccaggcccacaagcccacttccagcagtgcatttggtcagcttccccgccatgggtgcctcttcctttcacaccctgtcctgtcttggtggggctatcccagggtgtgcccagactggccccagctcagggaggacctcgggtttcctggaggtacctgcagtggaactccctgcctcagctcccaatggactcggacgtggtgagcccttggtttccccattatgatttcgaacagggctgttgggcccgtgtcccctccaaatgtgtcctggacagccctgggaccatgggacagacctagcccaggaagcccatggggacctcgacaccaggccctgcccaggcccatcaggactaagaaggagatcaggagatacccccactgcaacatgggcacctgtatctggaaggaaccagggtggcacccaccagcttccccgcagccccagataccttggaagatcccattcaatggggaagctggtcccatcaaggccacaagagagagacgtgagcacggcatccctgcagccccagacagccagcagtatggacctggggcacaatacccaggccaagagtggcctggcctagaccccagccctgggaagagaggggtaccagggctgtggtgggctcccagctgcagtcagcatgaccatgcaggggaccctggcactgcagagctctgcattgtcacaattcaccttacagaaccggggagagatctcgaagccttgcagccactgctgcagccacagcaggtgccaccaccacgtgccttccagctgccagtgcaggctctcctgacagcagggcaccctgcagccctcacctcagcagctcagactctgaaggtatctgttgttcatgttcccagtgctcccaccaaagagaattactacagagaatactcttggtcctgaggtgggcaaaacagcatgccctgtggatggagccggcttctttcccagccaccatgcttgctggatgggcccgcagagcaagtggccatgagacgggcatggggacgggagaggctcagcatcctgcacatgcccttaccaaggctcaccaggctgacaccactgctgagcgccttgtctgtggaaaacagattcacacccaacccctgggatggcaccatttcccagaaggaccagctggccacctactggcaggctgaccacactgcggaaggggctgagattggctttcactgcactgagccacaacgtggacatgcacttgccggccctgcagtgcacacagcactgcttccgaccagggcaccccattcacagctagggacaagcagcagtacactcccgaggccccacaacccaaacaagcttcccatcctcgttttacttttttgttaaacttatgaaaatttatgaagaaagtgcacagctctaaagacattaacagatggaacacatcagcccccagatcacaaagccaacccagcctctgcgcccccagccctgcaaccagtgttctgacttctgacaacaccatgagcctgccttttgtactttacactcatggaaggataaccacgtccatgttttaaaataaatgtttacttttgaaatgattttagatatatagaaaaactgaaaaggcattatagtgtactccgacaccttccgtccagctgcccctaataatgacattttgcattaccatggcacatttgtccaaattaagaaatttaggccaggtgtggtggctcacacctgtaatcccagcagtttgagaggccaaggcaggaggttaaggttcatttgagtcctggagtttgagaccagcctgggcaacataggtagaccctatccctggagaaaagttaaaaaaaaaaaaaaaaaaaaataaggagccaggcatggtggcgtgtgcctatagtcccacctaatcaggaggctgaagcaggaggatcgcttgagcccaagagatccaggaagcagtgagctatgatcgcaccactgcattccagcctgggcgacagaatgagactttctctcttaaaaaaaaaattaaggaatttaacatgggtgcaatcctgttaactgaataataatgttaactattatttaaggttattaatgctgtcactatattaatatggtgaaattcattcagatttcacctgtttttgcttaacttctggtacctgtcccaggatcccacctcggactcaccttctgtctttaggtcattcctccttagcttccttcagaggttgcaaccaaacacacaccttggctgaatggtagagctgattgctcctgggctccaaacctctgcagcatgttaccatactgagtaccataggtagtggtaacacaatgatggctatttgtgtatctaaacacagaaaagaatgataaaaatacagtataaatgataaaaaaaaaaaaaaattggtacacctggccagatgtagtggttcatgcctataatcccagcactttgagagaccatgccgggaggatcacttgagcccagaagttctagactagtctgggcaacataaaaagaccccatctctttttagatatcaatttttagagatggtacacctgtatagggcagctccattataaccttatgggaccaccattctatatgcattctggcacggactgaaatgttgctatctgacacatgattgcataggtaagtaatctagagatgatttaaagcatatgggaagatgtgcttaggttatatgcaaatactgtaccattttatatcaagactggagcatctgtggattttggtatttgtgggaggtggtgaaactgattcccgacgtacgcagagagacaactgtaaacatttcggaccccacagaaggctcaattgcctgccccctcaccctcaggtaagctttctaaagtgtttgtttcactttacctgctcatccgtgagccagagggctccatcaacagcttgggctgtctcagaaagacctggattcaatcccattcagccacttagtagctgtgtcactttgggcaaatcatgtaacttctctgaacctcagtgtcctcatctgtaaattgggccgatggtgacccttactttgcaggcccccgtgaggactaagtgagatgaaagctgacaccccaagtgacaccacttctcccttcctcagactcaacaggaaaacgccttcactgcccaatgcaaaggctatggggaggatgagaggctccagggatcccctgtcccaggagcataaaccctggatttttgcttccagaaataaccttctctaggatcaggatggttcttaactccccaaagactgtgagcccaccctaggcggcatcttcagcagtggggaaggggatgcacagtgccagcctcaccctggccactgtctgccctcatgactcagagcccagctaggtccccacgcagagcagtgcaggaacctaccttggtcccaggctccagccatcccggccacccccacctgccaccaccctgtctcctccatccctcagcccctgcttgcctcgttcacagctcagtgtcctgacatcttagctccttgcatgtcaccgtcgtctgtctcctcaaggggagtgcagcacaagggcaggaaactcggtcagtctgtggatgtgtctctggtgtcaggcagagattaaaagctccatatatacttgcccagtgtctgcgtgcattccaaagcaagagacagctttggaaatgagaagagaccctcctgaggtgagagtccttagttggcatttcccaagtattctcggcatgccaggcactgagctggacccatggacatgtgagctctggaccctgtgggtgctgtcactcatgtacaggtgggtccgcctggacctggtgcagtcacatagctccctgatagctaagctgaaattggaacccgttcagtttggctcttgctctgctcaatggctccccagctgctccaagggagagctgaagccttgcagtggcctcaggtcattgaacctgggccttctctccctgagctatctcctgctctcccctagctcacaccaggccagatgcaggcttcccctctgggcctcaggcatgccaatcatgctcctgcctcagggcctttgcacaagccattcccgctgcctggaatgctctctgcctagaaaactgcttggctgacccatcacctcctacaaaccttgctcaaaccttgcttcatcaatgaggacaaccctggccatgcatctagaaggggcccagcacagggtatgtgctcaatacacagatgaagaaagaagggatggagaagagggaggtggaggaagggcagaatgcccatggccatttttattccagtgataacaggtagcaatgaatacctaagggcaacgcggatggggcaaaatgaaagatcacaaaaggccaacatgagcaggttgggagagtgcagctctactcatctgccctgatgcagatttggggactccagatgtgtcacctctgggcagccccttctcggccccctccccactgagctcttcttccacctccaagcctggcccatcctccagggatccaggacaatataggagacagctgtttatctcccagaacactgggaaaggctgtgggtgggtaagatgctcagcggcccttgaaactcatctcagttttgctccaaatgtgcagccctgccactcctgtgaacaggaagagcactggaatgagaatcaagacactgggccctattcctcttgacatctgaatatcttccccatcccagcatttcccaggggcctgggagagggacagttgtctcatgtattgtcctgctttgtctgtgtattgagcacatactctgtgctggatgccttctagatgcgtggccggggttgtagtcctcattgacgaggcaaggttcgagcaatgtttgcaggaggtggtgggtcacccaagcagatatcttggcagagagcattccaggcagtgggaatggctcatgcaaaggccctgaggcaggagcatgaccggcatgcctgaggcccagaggggaagcctgcatctgtcctggtgtgagcagaggcaagcagcagagagctcagggacagaagtcccaggttcaatggctgaggctgttgcaaggctctagctgtcactcagagcagccagggagccagcagagggtcctagccagaagtgggttcagctgcggctcaggtgttaacaggccacaccacaccagcagggaggagaggggggccagctggctggtccaggtaagtaatgaagggtgctcaaactaggtgggagaaggcagatggtgagtagagtcacctcaggatcattgtgaggatgtcacctacatgatttgctcatggacttaatggggatggggtctggagggaaaaggagagaccagtccacaggccccatgagccatatagaagccagactgaatgggttttaatttcaactcagctagcagggagctatgtgactgcacaggagccgatgcaaactggacagacagggacatcctccctggactactgtcccactcatccatccattcatccattggcccacctctagtactgtcccaactacagccctagcaagcggagacaacaaaaagaccagttttccagctttgtggtcttggaagaagttgctaccagtatgaggagagacaatcagtttcctccaggatccagagagcatatcagccagcctgagggtcaggaaaggaggtcggcctctccaccagctagacaggcctgcagtaggatggggctggggctggccatgcagatcacttgggcctcatgaggggaaaagaaagaccagggggcagaggaggagcatgggggcagctggtggcctcagaagaaggcacctcagagaaggggtctgtcttagtttgttttgttttcacactgctatgaagaaatacctgagactgggtaatttatcaaggaaagaggttgaattgactcacagttcagaaagcttgcaatcatggtggaaggcgaaggggaagcgggcatcttcttcacaaggcagcaggagggagtgagaaaacgaggaagtgccatgctttaaaaccatctgctctcctgagaactcactcactatcaggggaacagcatgggggaacccagccccctataatacaatcacctcccatgaggttcctcccttgacacatggggattacagctcaaaatgagatttgggtggggacacagagccaaacctatcagtgtctcacgtcttgcagctcccctggggctaaagctgaatgcagatctgctgaccctgatctacagcttgcggaagctctgcctgtgtgcccccatctgctgcttcctagggttggggcctgcttcctcaaaaggagagtggatctgttctcctgccagccccccacagggccttgtggagccctggccatgtcctcccaaggtgaggtcataaaactgggctccttgcccttcttgttgcttgggtgacaagcctcgggtcatccctaggtcctgtcactgctcctgcttctaaaaggagagcattttgccaaatcttcctgggagaggctgggggctcatccctgttatttgttctagcttggtaaaatgaggttaagacatctaggcaagcagacaatagaggggcacccaggaagggtgggtggcgggtgctggcatttgggcttgcctggaccttgtggggagggggaaaggttaccaggaggcagcactgtcagtcagggctaaagtcaggaagtggggggagtgggggcagagtgtggctggcttgcgggggggcataagtgagagccaagatttgtcagcatgcagtgggtgtggctgacacctggcctaggggctgtggagcccagtggttgctcttagttcctggatccagggagatttctggagcctgtgcctggggctttctaggggtgaagatggtgaggggcagggaaagggtggcagaggaggccttgcatggcagggtgcagggcaggatgctgggcagggaccagattgcagtggctgctctcatccccaccactacccctacctctaccccaaccctggagcagggtggggccttggcaggtgtcctctgttttggcctcggcagatcacaggatggaagccagcagtccaataggcgtgccactcaagccagcagtgacctgcagcttctgcttcctggagagtggggtgcccacccaagagagcacaagcacaccccacacccctgaccttgagggcactgggaggtgggggcactgtactgggaccaagtcccggcagccttgtgcgtgtgccctggaaggtagcctaggagtcctgcgtgtgcctctctgcacagcagggaggggtgggcaggagcctgaacagtggcagagagggagaggaggagggagagagaagtggagaaggagagagaaagagacatgggaagaaaggagtgagagagagaaagagagatggggagagagacagagacagaggaggctgagagggagtgtggggagagagataaggagagagacataaaaggtagagagagagacagggagagatgcgcatgagcagaggtcaggtcactcttgatcttagttcccagtgcaaactgtaggtcaccatcacctgcccacacatgcactaaagagctctgtgcctgctgcccacagcccctgagaactccttctcttgaagaataaaacttttgatggctgccattcctcactggattttggttgtgtctttgatgaaccatgatgtcccaccttcccgggctcaagtctccaccaaaagctgatgcctctttttgggaggctctgcagtgccttcatctcactaggctccccaggaagcttgtgagcttgggttggaccctaagcagtcagatacatgctggggctctgcttgtctctttcactaacagggaaagccaagaaagagattgaagcatggtctgcagagaaggcacttgtgcaaacaccaggagaacaagaagcctgagttgtcttcatttctcttaaaaacactcattccctcccatgccaccttagtgagggcatgaagcacagcatgtgtgtgtatgtgtgcaggtatgtgcacatgtatgtatgtgcatgtgtgtgtgtgttgcaggggtgtgctgtggacaggaggtccagggggcagctccaactcaaagctgcaagtctctgtgatagaatggtcaagattcactggaccacagcaagagagtgttttcatgtgcatccagttttattagcatttaaacccatatttttagtaccctgtaaaccttaagttgcttatctattcttagaagcatttacaccagtggtccccagcctttttggtaccagagaccagtttcatggaaaacaactttcccatgggccgaggagagggaaagttatgatttggggctgattcaagcccattacatttattgtgcactttatttctactattaatatattgtaatatacaatgaaaaaattacacaactaaccataatgtaggatcagtgggagccttgagtttgttttcctgcaactacatgatcccatctgggggtgatgggagacagtgacagatcataaggcattagattctcatgggaaactctgaagtttcccatcagcaagaagctaggagtagagaagcaagagaccctcttccctctctcctttcttgaaggagagaggaaagaagccccctcagctagccctgaaggcaaacgtatgcaatgctttagagttactaacgtcagagtggtgtaaggactggaaaagatggtccatgttgaatccacactccctcccattcccagtctcctatttccaggaaaagctgtccaggcccttcccaggcctgcgttttgtttggggcacatatgccaccataaactccatcacctgccatcttggaactctctctccacaaatcccttttttctttctacttttatttgcaaaatttctgacaaagaaaatatcattggaagatattctcagtaaaaatcagggatgtgtatttgaaagagaaaactgcatcctgggcaacaaaatgtcctgagacaatgaatcggctagacagatatcttagagaaacgaaccaacccaaatgtggtcctcattggcaacatacacatattttattgatgcttctatggttaatagcattgccatgctcctcttgacacatggtgcttcccagtccatcatagaggggctcattgtttaaatactcattgtttaaaccttgtatagtgtttccaggagagctttaaattattgtaaaaaagcagctagattttttataaagtgacctttgactcgcttaaccttatccttatcatagtaagtatgaaaattacagtacctttatacaaataccttattggaggggtctgaacaaatgtcattgccatcacttagatttgtgtatacatttacaaaaccataaaatgccagaaggacatacatttaatatacattaatgcatacatttcatatgtatgtccttctagcattttatggttttttaaatgtatatacaagtctaagatttttttaaatacaaacataaacatgaactggcatttttcaatcaacttctttaattggatatacaatttgtgtgagtttgatagaactcgttggtccaaccaaagaagttcactattttactaggtcttcacttgttatcagtcacagcttaacctaatgatcattaatgggaaaaaagaaaaaaattaaccactttgtgcctgggactgtggtgtcctgggtcaaacacaagatattacaggttactcagcctattctaagcgtcataagtttccaccagataaacagcaatgccatgaagacttcaaggattaacacccaggattaccacaattattagtggctgaaataaagagattagcctttgcttttccatccaattcttttgtattttgttttcttttaatagcaataaaatactttaaaacaaacatctagtcaaaaaaaaaaaagaacagagaaaatatattttacaacttgtgctttcctacccagaatctgtggctgttaatattttttcatatttgctctaagtgggtttaaaattaagaaatacagcattgagaacttctttgacttccatatccattcttattccaatctcttcttctcagagacaaacacaattatacatttgatatgtatgtccttctagcattttatggttttataaatgtattacaagtctaagttctttaaaaatataaacataaacatgaactggtatttttcaatcaactcctctaattggatgtacaattagtgtgaatttgagagaacttgttagtccaaacaagaagttcactttttcaccaggtctttacttgtgatcagtcacagcttaacctaatgatcactaaagggaaaagaaaaagaaaaagtttagaaacatcctgactctctcaattagaattcaaaactttctagaatggatgcctcacattgttacatttgaccacctttgattcaacagcccctgagctttatgtctagcaagagatgcctagagctctatggaaaaaaggggcagcagaccagaccaaaactttgcagtctcagcatatcacggagacacagggacgtgagcatgtcaggtaactttctgggtttacacttaagcacctctgagaactggaaaaacccttggcacaaattcaatctttgtgtgggcaaaccactttagttcttagtttctgtttactgttgggcttggttcaaatgttgcattctgtacccctgttcttgccaccaaagttctttcaccatgaagttgcacgtctaatcctatgagtgtcatggttgttaatctaagaataacatactgccttcaaagaacagcgtcaagtttgagaaaaggaagaattactcccttctcattagaaaaaagacaatcatgtacccacatgtttcctgctcttctcagttgcctaagtgcgtcttctgttgataaacaaaaacattttttgctgcatagtattgctcaagcaacccctctatgcctcatttcctcatctgccctaaataggttatgcatttcaggcaggcagattattaattatttgttgagcacttattgtgtgcctactttacgtctgccataaaagtaccacaaggatcagtttaaaaaatgagagaattcctcaaaattatttaaactgtctgactcaagctctaatctagcagggacaatggccagatggagtccagggatgaagttttgagctggctgcatgggttgttccaaggcagcaatatgcaggtatgagctgtgccaggcacaagagcacccagctgcagggtgggatggagacgagcttatgtgctgcttgccaaatcaggcacctacaggctgcatccacccagagagagagcctttctctaaaccattaatggtgcacaggggttattgcagacctggctgagaggccaagagcagaaaaagctagagagaatgggggcatatatcaggaggcatcaaaggccagaattaggaaaagctagagagaataggggcaaataatgccctggaggcacccaaggccagaaccagaaaagctggatctaccattaaatccaaggggtgaacatggggttagaaatggagacaaaggcaaggtagtgacagaaacagggccacaaaaaacgaccaagcaaaaaaactgacaattcactaaatgcctaagacaactgcaatagacattttgtttttttcttcttctcctcctttcttcctccctgcctttcttccttccttcctcactcattctctctccttccccctcgtcctcctcttcttctccttcctctttctgttttagtaacaatctcagagcacaagtgtaaaccttcagttaaacagacagcagtgaggcagacatctgcttttctaaaatccttgacatccaaatgtgaaacagagctcactaaagctcagttgcaaaattctagatgctcctctctccatctctaacccatggaatattttccctcttatagccccttgaagtgtctatgcacttcagttcataaaatgctgccgtggggaaccaatctaattaagcacttaccaagaaagcattcaaactctctcatctatgtcctttccctgcccccagagtgcacccttcttagaggcatgtccctctgtgctggtcatacctgtgcattaccatgcatggcctgcagtcacttcccgcagtgaccctcccacgtgtccccctggctctttgacaatggaccacacaccctctgctctcagggtcttggtaaccctcatgtttcacagcagccagcagtcagtcagcctccacaaccaaccaagatgaagtcagcatgtgcaggtctgaaataattattaacaggaaatacaaacacgttaaattttacccaggcctttaatgatacacttaattgttggtttcctgtgtagaaaataggcataagtggaaaccagttcccataaagtgactaaaattcctatgactttgacaccaccagctctgtgctttacttttatctttccatttgaaaattctgattgttataatcagcaaaaataccaccagtttcataatcataattagccatcttcctcctaacacagcacgcacacacacctgcactcacacacacaagcataggtgcacagacccacacagatgcatgcaggcacatctgaattcatttctctctgattctcagccctcgagctcagattcttcagtttcttgtcccatctggcctgtcttctacaaccctcaatttgagagaacctgaaactagattctcacctggttactgaaggactcaaatgagcaaaaccttttattctcaaggctgtggagaccctgtgatgagcaataggaaaggggtcagaatgcagggctgctaaggaagtgaataggaactccatttactggacacttatgatgtatctggttgggttgagcatctttgcaacataatctgattctacctttatttaaaaaaaagtgaggtggttattagtctcccattttcagtttaagaaaccgtggcttaaaaagcatagtaacacaatgcaggctgagatacagatagaggttacaagactgaaaccagattgaaaactaaagcagtcactttcaaatgcatgatttttctgaggtttggtttctagcctttcttttttcaccttttaaccacttttaaaactttaaacacattcactcccatgtgccacacccaagctttagctcgtcgggatcccccacagcttcatttgtgccgctgcaggaagtcatcttgtgtagatgccatcacatccaggccgcagctgagcaagtgtttgaattttttgtaaatacatctttgactggggaggctgtaaatcctccctaggctttactattgcaggatctggccagcaatctgcaatgcaatggggctctttgttcccaggaggattggcaggttgagaaagaatagacacacacaagatagtgaaagctgggtccggggggtcaccgccttctggtcctgcgatgccaccaatgcactggatataaatatagcatttgttattaagtttagtgagggtgggggtaggttagtgagggatttcgggtcatttgattatgaggtgagatggtcacatggggatgaagcaattctttaacataacatctgtatgcagaagtacaatatacagagataagaatttacaatatagtatgtgcatcagtaatttctaacagagccttaaaacagaaacacagtgtttccataacctgtgattagcaagatattaatcagcagtaacagttgcagcaaaagctggttacaaacaatccatagaaacaggacgtgaagctagacaacaggttagaccagaaattctcagaagggagaatgccttaaccctaaagaggcctagaagagctgtggcaagatgagggcatttatagccctatcttatccatatgaacatgcacccctcatgcgtccgtttataggctctcctcaagggtcgcattccgttctcagagctatgaacatctgcttttctgggataggaatcttggtgatgtgaaacatccctgcctgcccttccgttcatagactctgcagggggaagcacatcacacgctgttggcttattctggtagtccagcctggcattgtctttacacaatcctgcatgcaactttgtatttacaataatcaggagcatttcatcttttattccatagcaatagtttcaagggctccccctacactttacatttcagtcctgtgcttgtccctacaagtttaaaaaaaaaaagtgagagtgagggaaagctacctctgcacacctgcagcaggctcagcgaggagcctggtggggccggggcccacctgcctggcacataacttcatcaagttgtcagtgtgcattttgcaataacaagggacagatcatgtcatcctcatatccttttatagttggagccattcttgggacttttggtgcctgctgccagactctcctgtttttgatgagaaatgtgagcagttgttgttagatgtcagtgattcttctttgaaacataaaagaagacatacctgacttgtaattgtcatccactaccctgaaactttaaatgttagtgttcagtaaacctattttccattcagctgccaatgcactccttttaataaaagtgtcaatcaaattcatccttttaactctcccaaggctttcctcttcccttgaaatgaaatcggatcctccacagaactggcgagcccccatgtaccctggccactgcccacacatacaggctgattgttcctcccctactcatcactcccgatgccctggccttgctcccttcttcaaaggcaactgccttactccctcccttccttgactttctgtccctctctctggaaagctctttccctctgctctgtttcttctctgttttcaggtctcaatgcaaatgtcacctctcaggcaagctctccaaactgagacaataggagctcggttcacatctgtcaaaaataggagcaaacaggctgttaggaggctgagtagaatgttttactgggactagacaatatcaaacttagatcccaagagcccaggaattcgtattcaaggtcaaagtgtcaacaacaagaatactgagtcttacataggtaccatgctgcaccatttataaagcacttccatacacaggggatcttcacaaccccacaatgctgccaggccaggtctctcaaaaggaggactctgatggtcaggggagtcaacaatatatccaaaaccaggaccaaaaaatgttgcctccaaaacaagccataattcttcttctcatcacagcatcccacaccatctcctagtgggtaagactcatagcccagcgccatcatggtttatttcacagggaagggtggggcagggattaggagacatttcccagggtcttgtttccttgcttccttgctatgggcctctcccctcagagcactgttttctgagaaggcctggctcgaggagctgatgacctcagcgactgcagacctgggaacctgcagaaaggagaaattaagtttgcacctgggaaagcccagggttgaataacagaacctcgcctttaagaattcttgctttttttttcctgcctctgcattgttgctgaaatatacaagagagaaagaaaggattctgaacccattatttatctcctccttccaagcaagcagcagacattcatgattaatgatgaggtgactttctacattgatttaattgaaatctgtatcctatccaggttatttttaaagtttataaagaccttttctactgattcttctcttccaaactcaaataaagaaatgttttatatacatgatcttccactaaaaaggagcccagactctcagatcctcaggaacatctgttctccattctataggactgtgctgctgaagacaaatggagtagcgagtgaccaatctttgagactcagcattctctctatgttagccctaacgcaaaagagaggactggtccgcacctaagggaagaaggtggccacgagcaactgttgagggctggtctccttagctgtcctctggtatccacagccctgaatggaaggttttgggtatttttccctggacatctctaccacacctaaatatatggtctgcaagttttggagagaatttccaacccccactctacctcctgcccctccctacctgttctcataggttgatgatattctaatctctattaagagttcccattctcaatatctcttcatttcaatcattgatttagaaaagtaggagtagagaagtgaaaaatgagactcaatctcatttgtgggctgggccttgggtttccttacttgattgctgtttttgtttttttaaacattgccaaatctggatgccactgaaggcagtaatgtgacataatgatggtcccaactgcatataaataaaaacaggtggggccaaagctcaaggctcactaggacaaaagagacttttccgccaaataacccactcacagttctccatcatctgacgcagaccccaggcaactgagcagagaactccagcatagagttccaggcccacatcatagaactacagaaagtcacaaggagtccttgagtgccgaggcaggaacaaagagaggaaggtgaaccaaaggcacctccccaccatccagcctagcagatcccacactcctcctggccactatatccctctaccctttgctgctccttcctactttctacctaaacatttcagcacagcatggttgtgtgtgtgcatgtgtgtgtggtgtacatatgcttatatggtatgtggttatgtatatgtgtatatgagattatataccatatgttaaggtgatagatttatattacctcagtacaggttttttttttactcaaaaggttttcggatccctccacttaatgtttcagaataaatagttcctgtgtctctaaagacaccttcatatgaatttgccattctgtttcccaccaccttcttcccaaacactaaatccgggttaatagtctttcatggaggcttttccattgaaggaaatcataggccatatatggggtgaataacctcttcatctgatggaaaaactctggttatttttttaatttatacaagacagccaattttggaattaatgagtgaaacagacaattataacttttgaataacagtttattaggaggttaacaaaggatttctattgcatctccaaagaccaagagtgacaaggaagatttgctccaattatgttctgtttcatagcatgcccatcagctctatcacatttaatggaattttctctaaattgtattatttaagttttattcaagtataacatgttatgcaaatgtgtctttatggtgatagatattgcttgatcttgatcctgctgtaggtctctctatgtgactcagaagacagattttgcagccttatgctgaagaatcaagccagggaatacagtggaaggctagagctgacccctggaagccagggttgatagaaaggtttctgcctctttccaaagtgtggtcactgttggagatgttgggatgaagtagagttgaggtgtgactgatgcctttcttctcctcctggttgtggggcctctagtacccaaatgtgttgcaaggcccacaccgagcacgtaggccacagggattagagatacagggcccagtggacttgtcacatgcattggttgtggcgcaggggttggaggggagcctgtgggcagaaaatcattggagcaagttagagtaaaatgagctgaagagattggaaaatactaaaagggctttgtgtaagaatattgttcctccttggacttcctccaaacaaaagcttgaaattataaattcatttccatcaagaagactattcatctccacagcaacctaacatgccccaaggagaagattactacccccatactgacttgcagtcctcgctctccagcaggctccggtacgtgttgatctcacactccagccgcgcccgcacgtccagcagcacctgatactcctggttctgccgctccaggtcactgcggatctccgccagctgggactccacgttggtgatcagtctctgcacctgggacagctgggagctgtagcgggcctcgctctctgtcagcgtgttttccagagagtctcgctgtggtggggaagattgagagtgtcagagagctgctccttataaggttcctccatggggttccaaagaactcacaagctccaagagctaaggagagtgtgtggccccaagggcatccccaagactctgcctcccaagttcccatcgctcaccagcaggtctgaacaatacacaccaggttgtgctgggcctgcagctcgatctccagggcattgaccgtgcgtctcagctcgatgatctccgcctggtaggactgcagctgctccgagctggataccacctgcttgttcagctcctcggtctgaaacacccaaggggagaaaggatcagaccctgcctccggggccctggggggcctcgggtcctgagtggccacgtgcttagatgcccacctgcgtggcgaaccattgctccacttccctgcggttggtttccaccagggcctcatactgactcctggtctcattcaggacctggttcaggtccacagtgggagcagcgtccacctccacgttgaggcggtctccaagctggcagcgcagggtgttaacctcctgatggagaaagggcaaaattttaaatttcacaaaggatcttggtgctctccttaagagaatgcaattcaacttctgatcattcttaagctttcaagaaactttgttccctctgatcctgtcactaaccaggatctatattcaatgactaatttgtatactccactttttacaaactactttcaagcccatgacttccctctgctctttgtattaaatgtatcactcctcatttagagagattcagtgatttgggctcaaagctgatacatggtgggccattatttaaactctggtccccaaatgcccagttcagtgtttttgctagtataccatatagcctcacatgtttgactcttaagcatggataataaaaagaacagagtctagctaaagaggaaatacagaatgcttacttcaaaatctgccatcctggcatagaagagacttaaagggtgatttgttgattccaccagcatagattttgctgaaggcaataagtatctgtttacttccctgctaagcatagcttggtacttgggcttaggcggatttcagacaaatttgtattcaacctcatctctaccacttaatacattgcttctagaagcttcttgaagcctcgatttcttcatcttaacatgagaactgcctccggagttaaagcacttagcacaatgtttggcacatactaagcacttgattaatattaactgtcaccatttacattgttcttggatttcaggttgcataaaatacacgtcttcttttttgcccaactgacttagccataatggtgagcattttgctcaaggctgtttccaagcaacactgaacagcaagcagaaagagctctggacaggaacgaagagaattgcattttgttctagctcagccctctctgcctgatgggcctaggccatcctggcttctccagctacaaatggagaattggaatagaagattgctgctgcatgcactctaacctgggcacaggagaggctgtggcttctgcctcattacccagctttcctcactactgggcttgccaacttcctcactctcattcctgcctctggcagaaaaatcctaatctcatatcacaggtttttagattagtcattctctacatatccctttttgtatgcagaattacttcctcagctaattgagcctctactgacagcctgtcctggaccctgtggcagttgtgaaacaggtcctggctagtctgagcccatcactcttcagggaactcacctgctcatggttctgcttgaggcacagcagctcctccttcagggactccacctgggcctccaggtcagacctgcacagggtcagctcatccaggatcctgcgcaggccattgatgtccgactccaccagctgccgcagggacagctcggtctcatatctgtgatcacaggagggtcaggaacaggctgggcaggaataggcctggccttgactctgctttggtttggttagtcaggcaactaggaattagggtttgtagtttttatagccatctcttttgtttaggttttcagcatcgagctggaagaaaatgcactggtaattttacgtttaaagatccagtggatagacttctatattcctagctattcaggaggctaaggggagagggttgcttgagcccaggagtctgaggatctgaagttacactgagctatgattgcaccactgccctccagcctgggtgacagagcaaggccctgtctctaaaaaaaagaagaaagccagtggatttaggataaaagctgacaaactgtaagacttccaaaataatatgcttccacattctccattctcatgaatgggttctgtgcataggagaacatcgggggccaacacgtctacactaactcacagtacgactaggggtgtcacgtcacagaggagaagaaggaggaaaggaagtctaaggcctggggaaaggatctctgagctacggtgtgtggtggctctgtgaatcttggagaaagcagctagaacatagctcagtcactgtttgtttaacttgtgttgacaacaggctaaaggaaaggagggctgccagagaagagaaataaacagcaacaccccgcttgcccactcacttggtcctgaagtcatctgaggccagcttggcattgtcgatctgcaccacaagcctggcattctcagacttgctgcacaggatctagaaggcccaaaacattcaagaatgagcaaggacttggtaatttttcaccaatggcagtccttcctaattcacttccttggaaggatcaggatgtctatcttattaaatgctttctatatacagcaggtactcaatgaatatttccaaaattatattcaaaaaaagaacaccaaaatatgcaaaaagtataagtagataatcttttttctatcctaatgagcaatactgagaagctgatcataatagttgacatttatgaaaaacacctactatgtttctggcatgatactaggagctgaggatacaaaaattggtaagcacttgatcctgccctcaagaaactttcaatcaagcagaaaagacaaataggtaaactagcaattgcaggggactggatcagggaagaagccacatgttcccagatgtcccagacaactgggactactttgtcctaggtaatttccaatcttcccaatttgggccaaacattttaggctctcactggacactgtgcaccaggagaagcccagaggcatgaaggtgaggacaatgaaatcaggataagtaggaacctagaagagagaggcagccagcagtccaaggggcaaaaagctcagatgagggagaaagaaaatggcccagtctttacaaaagattccgtttccccagcttcctttggactcagtccttttctctcacctcagggtaataattctggagcttggcaggtgcatggaagcattcagaggtagtttttaattacagctcatttatgcaaagtgctgctacctccacatagactaacactatgcaaatatttagacctaacagtcccaagtctagtattagatgggccctcaaaaaacaaaatggaaaggccagttttcagcttttcattcacatcaagagcttacgttgtttctcaatcacaactcggattctctcccgacaacttcctactggaggcactgtgtcgcccactcctcaccttctgctggagctcctcaatggtcttgaagtaggactggtagctggcacacaccaagggctcctgctgctgtgaccgctcccggatgaggttctccagctccgcgttgtcccgctccagctgacgcaccttctccaggtagctggccaggcggtcgttcaggaactgcatggtctccttctcactgccattgaaggagccctcacagaaccagttgcagttgctcacattggcggggatgttgcaggccccgggcagggtgcagccgtggcagctggggggcacacagggccgggaggagcagctggtgcggcagctcaggctgggcaggccacaactgtaagacatggtgcagggagggagtgtccagctgaagacagagtccaaaatctccaggttgtagagcggtgggtctccttcctccagggagcatttatacctcgtccatggagggtgtggacacgtaagacaaccccttttttttttttttttttttgctcatttggtgattgtcaaaagcccttccctccatttgttgtgtttcttcagaagagtctctcccctcataaaatactttacttgggcttctcgctaagtcgggactcctcttccatgctgtgtgtcatgatgtaagagcttcatggtgtgacttcaaagacctggactcatgaaagccctggccttcttcagtggggtgcagcaggtcaagagacagtattgctgttctgctttgtggcttgaggcccctaactctttggcaagctctggctctccttggtgaaatggaaaagcatagctcttgccctgtgtcttttgctaggtcacatttccaagtgccaaattccaaattcatggttctcagaaagaggaatagatcctttctgggacagttcctgatggccatgtttcctgatatgatgggcttttttcatgtccatgatgacgtcaatcaaccaaataatagatatccactatgacaatttcatccagggcgatgtaatagacactgggaggggtggaaaataggactcaatgctatggtcagaagaagttcttacttgttaagaaactgcacaagcccaaggtagtgtggacacttttcacaaactagatcctttttacaaacatgatcctcaaacatgcagaacttagatgtccattattcctcaccagaactcttaaaggtaaactgtataattcccattttatagatgagaacaccaaggcatagagggtgaggataataagttgtggacctaggattccaaagcagatcacttttcttttcatcacaacacttggcttaaatataaatggcttacttccttcccttcttcagacaggccgtccctttctcctctccaagctctctttttaccttgagcatgacactgtcatgacttatgtgcttgtctctctgtctctatttgaggtccctgaaggcaagggcagggtctagtttgtctttgaatccccagctctaggcacctggtaggcactgttgaatgggtgtgggtagagtgatgaagggatgaacaggaaataataatctgaggcagaagttgacaagtgataactgagtggtttacacactggggagggcgagcagctccaggattggaggctcttaggaatggatgaatggatttgtgctgggatagggaggcttctaagaagcagaggggagaaaagtaggaagtgcaggtgaggagaataatgtgcacacaggaatggggtgggaaagcccaaggcatggttgaaggaccagggtaagtctaggcagcaggaaggggagagttgtgaagggaagtgctagaaattaaagctttatgggggattgtatggggaccctatggtagggggtctcgatggtgaagtggagcagcttggacttccccagaagctgtagagccagtataagcttttgaacctaagtgtggtgtgacaaaaggtgttttaggaaatgttttagcaaatatttatctgtttttgaaaaatgaaggaaagattggaggcaaagagttcagcaaagagactattgcaacagtccatgcaagactagaatttatggcagggatgatgatacagataaggtttagtacaagtgagagagttagagaactgggccaagggagagtacaaagagaagagcaacaaggagctgaggaccaaactttggagaatttcccaatcagagatcaggagaaggaaaaagaatctgtgataaatggagaaatggtgagaaaaaaatgataaaaacaagttcatggcatcccagaagggcaggaaggagggtgcttccaagaggaggtgatgttagaagtgccaagtgcagcaaaggggccgcacatgatcaggaccatggagagggtattggctgccttgaccagaaatttaccaggacctttccagggtcacacaggtatgcctgctgtacgcagcgcctgtgcacattcttaaagtaatgcccacagtgaacttcggtaaaccaagacttcaaacacacagaattgagatgttcattacttagagaagttctgctgcaataaatttatatatctgattattaagcttggagctttgatcttaccaatacagacttttatacaataattggagtgggctttacgcagatgccagacttgtttgaacttgatgattcgtaatagtttattatttaggaacaattatccaagaagcatgagtaatctgaactgaccgtgcatatgacaccacttctgttttgtcacaagatgtaagatgagccttatttgatatcctaaagaggcaatgaggaaaaaattcaagtatgggcctgaggaggcatacattggccagaaagaggaggggcttcctatgtccttgctagcagaggataaagcagacaacagattccaagcctcccagctacagctaccaatccaagcagcttccaagcctcccagctacagctacagaccaaaaaccagatggctttgcatttggctcttctcttcctccctcttacctcctaacatagatcctaaatatgaaaatggttaaaagagagagggaaaatcttggaacaagatattggggatcctaatggtcaactcatccaaaccgttcgttttacgaaggggaaactgaggctcagaatggagaaatgccttgcttagtatcatctagctaggacccagatcttctgattcccactgcattatcagcccaatcaccattctactgaaatgttgaagaatttcacaaacaatctgatctgttattacctaaggacagaaatcaagggcagtgagaaaaacatcttgttaaccatagatatgctgtgttgaagaagaattatgagtcaatgtgtaaataaagatagaattcagcaatagtacagtttcttgttaactctctgatttcaattatttctaagttgatgatacaattatataccaacaatttggagtaatttaaacataattatatcccatcagatatagattatatcccatctgtttggagcaacttagaacaattggtcaaacaatggtgaccctactcgacagcaatatgcttatccagagtaaggtacacaaaagatagtcacaacaaaattaaactattattaaaatggggacaattgagagattaaagaaaacacaccacaatgacactggatgctattaaatgacaggattatgaatgttttttttcttctctccaaattctttgaaaatatatgttacttctgcacaataaacaaaataaaatttacatttaaaatttcagaaggaaattcttgcaaatcttctagaggaacaatgagttattaaaaaaaaaaagcctaggaggctcctgttccaatataattactacattacacttgagcctgttctagaaataaagtctttgttgtgatcggcattcatgcccttgtgatatctgctgactttgtccattccaaaggtgagctactaagaaggaatgaagggaaatcaagctacctatagctcatgaattgactggcatgaggtctgagcttcgggtgaaggagaagacaaggaggagtaacccttggagaaacattctgccattgactgctagcccatggtccaagattggctgctagaaccacctcatattgacccgcatccatagactatacttcccacatacacataagggataattaaatttcttttctggaaatactatctaagtcagataaagcctacaggcttagcatgctggagttaccaaggacctaactggtcatttcactcaactctttcattttaaaaatgggataactttgacccaaaaggggaagtgacttgcccaaacttgcagagagcttgtgaaagagtctaaactgaaagaggataaattagactaaagaaataggataaggcttttagtctttatgagagagttcaggcggagaccaccgaacgatgcaagtctctctaaacactaaacccttagtaaaaaggtgaactagaaaaataaaggatgcttgttgttaaaggaaaactttaaaaagctgaactatctatctcttagtgggctctaattttaaaattataatagtaaataatagtaaatagtaaaatagtaaaaaaaaaaagtaaatagtaaaaatctcctttgagattgttaaactagtgacctatttatcattaaggtttgggggttgaatcaatgcaagaaccttcatgctgataaattaacaaaacacccaaggaaataactcacaattagcaaggaggagaagatacaagaaacagaaggttaaagccaagtatattaaataactatgtttaaagagcttatacgacaaaataaggaatcaaatccctaaaagaaaatggtagccactatgcaaaaagtataggcatgtttaaaaaaaaaatgtcaaacaacttctaaaagtgaagagtataatttaaagtgcaaattttaagtgtaaaatttcatcactaggtcttttgtggcttcaaaaaatcaaaattttcttttgatatcaataatattattcagggtgctaaattttcactcatctcctactgaactaatgaaattttaattaaaaacaaagttttagctctcataattctattggacatttttagatattttatacttctcctattaagtcacagcaattgtttaattgttgcatttgttctgtcagcttaattttattaataattgttccacagagcttcacagaaatattttaacagagttctaggagtcaataaatttaattgttttacttttttcattaaatgacaaattcatttttataaaattaagttgactcctaatagattttgtctgggaattgatgtaattttgttagtttttacatggaatgttgcatttattcatttctgttaagatataaaatatgcatttctgccttattattccctttattcaatcactttttatgtatcaaattgttgttagctttaatagctgaaatatccctttcttacaaagccaaataaagtattgtcatctctgttagaattgcatttattaaagccaattctaaaaaaattaataataaaagagcctttcttttctacaaaagtaaaatacaacaaattttcaaactcgattgataggttaaacattaaattagacaaagatgaaaagagaataagtcaactggaaaagatctctaaggaaatttaccagaatataacacagaaatatttagagattgaaaatatgaaagagatgacagacaagctagaatgtgaaggtccaaaatctgtttgaagaagcacagaaatggtggtatgaagagcttggggaagtctctcccctagaaagacatctattaagccactcaaaattaacaaagacatcagtcaaaggctctaggcattgattaaagggcttacaacaaatgagaagcatttactcaacaaccacacacaaaaaatggaaacttgataagaacactgggggctatgatgtttaaatgagggactccattatttctcatgtctctgccttccagaagcaccatgtgctgggcagctgagtggcagttcccaatcctcccagcagccaatacacatcagcagatcccatttttcatagctcacccatttctaaccccagttccctctacatagggaggattcaggcagggtggcttgaggagtgcagtccttctttcctgcacacctctgtgttacaggagagatgttccattgggctccacagttaagatggcagtatcacccaagttgatctaaactttcaacaacacctaccaaaatcccagctagctgttttatagaacttgacgtgttgttccttttattcatgtggaaatgcataagaccagaatagccaaaacgatcttgaaaaagaagaacaaagtagggggattaacatttcatgatttcaaaacttactacaaagctacagtaacacagacagtattctattggcataaagatagacatacagaccaacagaataaaattgagagtctagaaataaaccctcacatttatggtccattaatattcaacataggtcccaatataattaatggggaaaaataatcttttcagtaaataatgctgggacaactagacatccacatgcaaaagaataaaatgtttgacccctttcttacaccacagacaaaaaaaatgactcaaaatggagcacagcctaaatgtaacagctaaaactagaaaacttaggaaaaaaatgtagaagtaaatcttcatgatcctaggttaggatcatgcacttattcctccatgatacctgttatatgttacaacatggatggaccttgaaacatactatgtaaatgaagctagccaaaaaaacacatattctatgacttcattatataaaatgtccagaacaggcaaatctaaagagacagcaatgatttcctgggcctggagggttgcagggaacagagagtgactactaatgggtacaaggtttctattagaggtaataaaatgttctaaaatggtagtagtagttataactctcattatactaaaaaccatttgattttatactttagatctgtaaattttatagtatatgaattatatatgatacattatacttcagtgaagctattttttaaaaaaaggaattcagaaggagaaaatggagtataagatataagtaatattgaaaaaatgtaatggctgagaattttccacgggtattgaaatacatgaatcaatcaagaagcacataagtcctaagtaggaaaactaaaccaaagccatccctagaataacatagtgaaactgcacaacactaaagacaaagagatgatcttagaaagagtcaaagagagaaaaaaatagaagaattaccaacaatggaaatacaggttagcaataggcttttcagcatcaacaacagaatccagaagataatggtataatatttccaacacgctgaaggaaaatagctgccaacctagaattttatacaaactaaaccatcatgtaagagtgaccactaagaaaagacattttcagaaaataacagagaagttgtcacttatagattcttagtctgctgtgtgttgctacagcagaattccacacactggataatttataaagaaaataaatttatttctccagttctagagactgggaaggccactatcaagatgctggtatctgatgggggccttcatgctgcattgtcccatggtagaaggtgtaaatgcaagagagcatgacagccagagagcaaaaggaggccaaactcattttataacaagtccactctcatgataactacccccctcccatgataaaatgacattaatccattgatgaaggcagggttctcatggcctaatcactacttgaccattaagtagtagtgaatggtttaagtagtagtgaatggttggaggtgtcattcaaaccatagcaaatgctataaaaactaccaaagaatgtatttcagaaaataaaaagttaaaaccagaaaggacgaataaagtccaagaaacactgcaaacaaataaactggtaaccatgtagataattctaaataataataataatgaccaaattttggagcataaaaataaggtaagattgaacatggcgactcacatctacaatcctagcactttcagaggccaaggtgaaagaatcgcttgagcccaggagttcacgaccagcctgggcatcatagaaagaccctcgtctctacaaaaaaaaaaattaattagctacacatggtggcatatgcctgtagtcccattactcaggaggctgtgacaggcagataggttgagacaaggaaggtgaagctgcagtgagctatgatcatgccactgcactccagcctgggcaacagatcaagatcctgtcaataaataaataaataataaaataaaccaagataaaaaagtaaagtaaagaacataaacaaaaatttctgacagggcacagtggctcacacctgtaatccctacactttgggaggccaacacagagaatcccttgagcccaggattttaagaccagcctaagcaacatagagagaccttgtctctacaaaaataaaaagtaaaaaattagccagacatggtggcatgcatgtgtggtcccagctacttcggagactgaggcaggagggtcacttgaggttaggatcctcaggatctgggaggttaaggctgcagtgggccattgtattaatccattctcacacagctataaagaaatacctgagactaggtaatttacaaagaaaagaagtttaattacctcacagttctgcaggctgtataggaagcatagaggcttctgcttctagggaagcctcaggtagcttccaatcatggtggaaggcaaaggtgcagcgaggtgtctcacatggtgggagaagaagcaagggagtgggggaggttctacacacctttaaacaaccagatcttgtgagaactcactcaccgttgtgacaacagtaccaagggggatggtattaaaccattcatgagaaactgcccccatgattcaatcacctcccaccaggccccacctccaacatttggaattacaattcaacatgagacttgggcaaggacaacatccaaactgtatcggctatgattacaccactgcactccagcctgggtaacagagttagatcctgtctcttaaaaacaaaaaacaaaaacatcttctatggatcttgtttttatgcaagaagaaagagattaaattagatagtgctaagtcaagtgtgcacatttaaaaattaagaacacatattaaaagggggaacaaagaaaacaagatcaatccacaggtgtcaggaactgaggaaacaataagcaacaaaaaaaaatcatccttaatggaaaggacaaagtaagatttttaaaataagtccaaaaagtcagtaataaaattacatgtaaatagattaaaccctatttctcctcatcagacatagagtgccctcaccaccttatccaaaagtttccacttcctattccctttccttgctttatatttcctctcagcacttattgcttgacacagtcatgcttgtttgcctctttttattgtctgtcttcttccacttgaaagtaggcttcttagagcaggtctttgttttgttcagtgctctgcccaacaggcaccatcgtaagcattcaatgattatacattggattgaattgatttatagagaagacacatgaatgaccaataaaaagattttttaaatatttaatttcactagaaactttaaaattatgaagtgagacaagctagattatacccacatttcattggcaacattgccttgtcacactagatggccaattgcaggtcatcatgtcatggtgaattttacagccagcgtatcttgccaagtcagtaagctaagtagtgccaactgaaaaatcacaagattaataaagttggaaaggagagctttatttctcataaaaggctgcagcctccaggctgaccatcctgcaagctgggaagcgtagcctctggcagaagccaagagtaagcattttgagggagggaaatgtgagaaaggaatgtatgctgagtgaggtggccaaatgcactatttaataagctacaggaggagtcatgaatatttatgaaaagacaaatgtaagcatgtgcaattgagcttcatgcctcttcatgggtcgcatgttcacaaatggtggcattagcatgatccaaggatggagtttttggccctctgatgttgaaaggtgaggcagaggatgtgaaaaccctcaccgcacatcctctgtagactggccagaccactccatggttggtggtctcttatcaggaaggaatgccagccagttggttgctgtgttgaaactgcaaaaggcgggaggaaggaatccagtcacagcttcagatgatgggctaaaggtgataaaggaatgattcatctgtttcttattttccagagctggtttctgcttactccttaggaaagaattctggttaaaagttaataaggagggggcatactgaggcatgtctgacctcccatcctgtcatggtcagggactctgtttttttctttctttccttcttttttctttttcttattatactttaagttctggaatatatgtgcagaacgtgcaggttttttacataggtgtacatgtgccatggtggtttgctccacccatcagcccatcatctatattaggtatttctcctaatgctatccctcccctagccccccaccccccaaaaggccccagtgtgtgatgatcccctccctgtgtccacgtgttctcattgttcaactcccacttatgagtgagaacatgcggtgtttggttttctgttcctgtgttagtttgctgagaatgatggtttccagcttcatccttgtccctgcaaaggacatgaacacaaccttttttatggctgcatagtattccatggtatatatgtgccacattttctttatccagtctatcattattgggcatttgggttgattccaggcctttgctattgtgaacattgctgcaataaacatacatgtgactctgtttttaaggtttctcttcggtccccttggccaagacagagtccgttcagtcagctgggggacttaggattttagttttatttctcagtggtaacactgacccttcccagatacttcagaagagcaatttggctttgtcctgagaaaaagtgatctccctgacactcctttcttttatcctccaaggagagcaccatggcagagataagaactaaggactgttttccctagacccatgttttccgctgacacaacatcaaacatagaaacaagttttgcttaatattttataaattgaacactaaaaacaaagtgtatttactgtgttgagaactttgacctctcactcacaaagcatgcaactgggtatttgggaggcactgttcctggtgaaggtagctgagaggtaactatcagtggacagtaatcccagcatgtgtggagaactgccgggataaattgaacaagggcggttttcatgaggcatgcaggtagctccagggaatgaactctccctgaggaaagagagaatagagtccacaaactgggtctaagacattctgagcagaggatggagtatcactcagacggtcttccaaggtctcctgtctaagctgcagcagcatcaacaacaaaggagtagatattaagtgaactagaatatgagagcacaagaatttaagactggccaggtgcagtggctcacacttgtaatcccagcaatttgggaggctgaagtaggcagatcacttcagcccaggagttcaagaccagcatggataacccagcgaaacccctctctacaaataatacaaaaattggccatgcatggtggtgcatgcctgtagtcccatgtactcaagaggctaaagtgggaggatagcctgagcctgggaagttcaaggctgcagtgagccgtgatcatgccgctgcactccagctggggtgacagagtgagactctgtctccaaaaaaaaaaaaaaaaaaaatttaagaatttaagactgacatgtgatgatggaaccggcatcatcacagcaggggagatagtatcagcttcatctcaaggagagaagacataattagcagattggttaatctgggaataatctgcagactgagggagtggccttggcacaaaccacagcatgcacagtgatgggagccattaaccttggttagacatcagcaggcaccagtaggggccaggcaccagtaccgtggtcactgttagcatttgcaaacacctgacttgtaatatcctaatttgattctaaataactttgagggggagggtcccgaaattcatatgtagttcccatggttaaacaattcaagtgagaaaagaaacactttcaaaataggttgggtattgctcaaatatggaagatggcaaggtggtgctttttagtattgagttattcagtatttcacaaaggagagtttcagagatgttttgagcactaacagcattgtgtctccccaggaggatgtataagctctgggtgcttgtttgaaatcaattttgtcctctcataatcacacctcatgtgtaactgacaagcagagagtgaactctgggttcagtcctgccattgattcttcctcactgtgaggaagagaaaaaattagtagcacaattcctggcatttggtaggtgttcaataaatattaacttctgtcatccctgctagggacttaaaagaatgagtggaactgtctagagatgctcaccgttgcattttactgagtaaggtcccatgagaaatatgtttatcatattcagacgaggcctcttgtcctagtgatcctacttgttttatgctggcctaagtggatgctgggactcactgtgcttaatgaatgttaatgaaggtgatgaagaccttttaggagatgattaacctataaagtcctccttctgctttcaagtggctttataagaagcacacagagagtcaacactttgaaaagaatgaatacaaatgagaatcatgtctgctttgcaagaggaaagtttattaggcgatttggggaactgcaataaaggtagaagcagcagagagaacaaaacacctcgtatgccactgtcacagctccaacctctgaccatcagaactcagactgactacaggagagggacctggggtgaggaggatcaagtagccctaggctcagagtcagacccaaacgctgggcatttgttctccttccagaccatgatttgtggtgatgcctcggggtggggtccggtggctgatggttgtcagagaggcagaactggcccaccgatggtagttctgtcttcatgctatacttctgctggccccagggtatctagtacccaaaggtgttgcaaggcccacagcgggaacgaggaccacaaggattggtgacacaggatccaatgggcttttcacatgcattggtggtggcgcaggggttggagggcagcctgggatgcagaagcattagactgtcagcatgagaagggtgattcaaacaagggagactcaatccaaagagacacagaaacaagcagaacccgttctctgatgtcctaggaagccatgccttgtttggatcactccttctacagagttctgatacagtggcagaaatgagcaaagaacatgtaaggtggaatcccagccttccttgtatgaccctagacacacaagaaagtcacttcctccttctaagcctcagctttcccacctgtaaggtaggactggtagtaccaaccacacaggattatgaaaattccacaagactgtgttcataaaaatattatgttcgctggcaactgctgtactgttagttattgatcatcaaccctattgacactcaaatgctcatctataagaaggtgataatgattcccactctgcctgcctcagatgattctaacaagaattaatgaaacggtggatttgaaagttctgtttaaatcagaaaaagtgatcattgttacagtttcattttcctttttgtggtgacaagacagtcctgaagacagaaagatttatttggccatcaacatccaaaaaatctctactggaggaaggagtcaagtcccatgactatcttttgtaaaagaaagtatctttagcccagataatgttagcaacaaatatcctacacttcccacggctgtaatataaaactctcgcctctacagacagattggcatctgaaacttgattttcaaagtctctgttttatcctacagtagaacagtgcctgtcccttgcaggggtgccgtccgccaggtactcacttgcagtcctcgctctccagcaggctccggtatgtgttgatctcacactccagccgcgcccgcacgtccagcagcacctgatactcctggttctgccgctccaggtcactgcggatctccgccagctgggactccacgttggtgatcaggctctgcacctgggacagctgggagctgtagcgggcctcgctctctgtcagcgtgttttccagagagtatcgctgtggtgggaaagatcaggaatgtcagagagctgctccttatagggttcctccatggggttcgaaaaaactcacaagctccaagagctaagaagagtgtgtggccccaagggcatccccaagactctgcctcccaagttcccatcgctcaccagcaggtctgaacaatacacaccaggttgtgctgggcctgcagctcgatctccagggcattgactgtgcgtctcagctcgatgatctccgcctggtaggactgcagctgctccgagctggataccacctgcttgttcagctcctcggtctgaaacacccaaggggagaaaggatcagaccctgcctccggggccctggggggcctcgggtcctgagtggccacgtgcttagatgcccacctgcgtggcgaaccattgctccacttccctgcggttggtttccaccagggcctcatactgattcctggtctcgttcaggacctggttcaggtccacagcgggagcagcgtccacctccacgttgaggcggtctccaagctggcagcgcaaggtgttgacttcctaatggagaaaagggaagaaataaacccacagaaagaagtctttcaataacttctttgaggcagttcaatataatgggaagaggattgcattgcagcttaggaaacatgagttgaagcccagctgtcacctctggaaattctggcctcttctctgaatcccttccctcatctgtatgatacggctgcttcattaaatgattgctaatatttctacccagtccaagattctatcatttctttcttatttcccctttgctcagtgataagcctggcatgataattggcttacaattgttgctacttaaatatagagaaaccaggtttcattcctcctatttatttcatgggatactactagagtatgacacatgttttcatcatgaaaacgtctaatgtttgagacatgcatctgatttcgtagtattgcattcagccatgagatctgaatcaaccattatttgagttatttcatttctcccgtttttcccatccatcagttcatccatccatccattcatccatctatccatttatctagcttgagttctagttatctaggtgaaacagagtgtaagaatgttttctatctccttccagtcttggtcattaacctacctggcacctcttcagaagctaatagatagcatcaaacagtagacagtagtttaaagatatttgtgtgacctttcagccatacatgtctggtcccaaggggaagtaggtcagcttaccacactcctttatgtaaaaaaggtaagctgtcactcattccccaacaagccccaaagtatgttttgagcaaccagcaaaatgttgttaggcctagggtgcttagcaaatcaaatcctaccttatcctattcagggggatcacagagctctcagtattgggatattgggggctgggactcttacctgctcatggttctgcttgagggacagcagctcctccttcagggactccatctgggcctccaggtcagacctgcacagggtcagctcatccagaatcctgcgcaggctgttgatgtcggactccaccagctgccgcagggactgctccgtctggtacctgcacacacagccagaggtcaaaagaggtccaaaaaaaaaaagtctttgtttcccggcctttacttggctgacttagtcaattttattatattttgaaatattttgaatttaaaaaattaagggagaaaatactcctgtactgagtgagaaggcctattttgtcactgagacacacagaaaaggtattggtggaatgcctgtggatagtttagtctaacacaaactaagtttgttctaagactctcgtttacaagttactatcaactaagccctgctgcttttgccatctcaagtgaatcagtgcccttcataagcctgctccaggttgtcctgtcatcctttccagccttgccaagaagcaatctagtgttgtggaagaaacactgaattcagagttagagccagtattctcattaaatgactgtagatagatacctttatctctctgaggcttgatttccttaactgtaaaatgaagacaaaactaacaccttatagggttggactgaagatgatatatgtaaaattatgttgtaaaatgtaagatcccaggaaaatgcaaaggattctcatgattgtaataatggtcatacctaaaagtattgattgattctctgaaaggcaatggattttgcctcctgtttttgtggtttaataacttctttttggggggttgacagtgactaacgtatacaaagagaccaatgtgaaaatcactttcaaacttactccagacgttgggttgaaaaggagtaagaatggatggtgtcttacaatcaaacttaaagcacagggctgcgcacagtggctcacgcctgtaatcccagcagtttgggaggctgaggcgggtggatcacttgaggtcaggagttcaagaccagcctgaccaacatggtaaaacccggtctccactaaaaatataaaaattagctgggcctgctggcgcatgcctgtaatcccagctacgaggaaggctgaggcaggaaaatcacttgaatccgggaggcggaggttgcagtgagccaagattgcatcactgcactccagcctggatgagagagggagactccatctcaaaataaaaaaattaaaaaaaaaaacttaaaacacagaatctgagcacctattgaagaggctttgacatttaacctaatcctaacccaatgcaagaatcctcccaatagaaatttctgcttccacattccaggatagggagctcatcactttgtaattcagcctgtccgttactagactgctctgatggttaggaaaatcttacttggttctgaagtcatctgcagccagcttggcattgtcgatctgcaccaccagcctggcattctcagacttgctgcacaggatctggggataggattaatcatgaaatgggttatactaagaaatgccttgtgccttaaagtgaaatgctattttctttcagccacattcctcccaaatagctttgagtcctttcagattttcagctctgagataaaaggaggatttgatcataaaactgatcatttcaaaaccaggacaaccaatgtgaattcatcatgaattctattcttatctgcttctggcttcctgcaataattaggttactgggtatccaacccttcggttgggtgaccaaccatcccagttaacttaggactgaggggtttctgggatgctaaaatgggaaaaatcccaggcaagccagaacaacttggttatccaacacattccacctgctaacttctctccactctcccctcatattgcccttgttcatgcctttgcaaaaagcttcttgctgtacccagaatgccctcacccactagcaagaccccttgtgtaacccacatacttaatcaataacacttcttatgacctttgtgtgatcattttgtttccacatctatctcccctgttagactgtgagctcctgaaggaaggagactgtcttactcagtacattatcccccaccccagcactgtgcctaacactctccaactctgggtaaataaatgaatgatattcaaatagcacaacccctttctggcatctaattttccagatctacagaacagtgggcagtcaattccctcccagaatcaagggcttgtacaattggatataaactcccactcatccttcaaaccccactcagacattgcctcttctgggatccctcccaaacctacaccaggtattcagtcccaattctctgtggactctttacttatatctacttctcttccagaacagatggccccatattgtcatctgtacacatggctgctctagaggatggtccatgtgtctgtagatattgctggagtcaacagctctcttgtgttgccataaatgctatattttgctacagctttgaaaggctttaaatatttgaagatttacttaggaaattcttagcatagaaaataattcaggtgcatactttttgaaaatgcggtaatgctctgaaaacaaaaccagggtatcataatcaaaccaaaaaatcagatattctggtttggagtaagacgccatataagattgctatgactgattttggtctaatgcttcactctaacaccagcctgcatccttcctttgtggctctacaacagattttctaagactacttgatgtcatacctaagccagtgaatctatgtctttatcattctcagcattactgtgaacagacttagatccattcacagtttagtatgtcaaatatagataagtagttcattaagctggcagtgtggtgcccacctcctcaccttctgctggagctcctcaatggtcttgaagtaggactggtagctggggcacagcaagggctcctgctgctgagaccgctcccggatgaggttctccagctccgcgttgtcccgctccagctgacgcaccttctccaggtagctggccaggcggtcgttcaggaactgcatagtctccttctcgctgccattgaaggagccctcgcagaaccagttgcagttgctcacattggcagggatgttgcaggccccgggcagggtgtagccgtggcagctggggggcacacagggccgggaggagcagctggtgcggcagctcaggctgggcaggcagaagttgtagggcatggtgcagggaggcagtggagctctggaagtcagtttcaaaacctgattccttttccctgggataagccttggtcctttccagggctttatattctgttagcagtgggtgtggcaaccatgtcaagtattcctcctttttacctcctttgctgatttttccatttgttatttagccacttcacctgagtcctatacctcattaaatgttttactctggcttcttgctaagtcaggactcctcacaaaacatgctgattggttaagtaagagcttcatggtttggcttcaaagtgaccaaccttgcctgtagcagtgcttatccatgggacattgagctagagtgacagctgggccctgtccccagagtagggggcacatatgtgcctctttctcctaaatgaggaaaggcttgtgtctcatccagttcatattcaattaagactctgtgagaaaagccatgtaaggaaacccgtctagaaactagactatgtgatagggaatcctggaagctgaaatgagaaaggacttacaaggccattggttcaaggcccatttgcagttccatccaggcagatggaggcaactctaccctcttcctatggggctgcaggaagccacccacctccgtttctactagtattcagtgttcacagaacattaagaaacctaaattttgggagcacctactctgcatgaagcactgtgctccatgcctgtgcacagcgtgactctgtcattggtgatgggtcctgcttgctgagcctccactgtgcaccaggcacagtgccaggcacctcatatgcaccagctccttcagtcctctcaaaatgctgcaagggtttgtagataaggaccctaagcctctgagaggtctcccaaggtcacagagctcctacatgatggagccagggttcaaatacagatctctctaattccaatgtccacactctgtcatattacatgtctctctcttccaatcttttcagtactgagatgcaataatgcaaaaaatacagattgagctccattgagctcaatcagtgctgacaatatcctaaattagaatgggccaaaaaataacaagcctgttttttacttattaaagaaccaaaagtcacttctatgctgaaggaaggaagtttactaagtgaaaatgcctcatacccactagaagcttgaaaaaaaaaaaaaaaggaaacccttggttgatctgagggagaaatacccaagcctagctctccaaaggatatgaccctgaaaatccaccactatgtcatgtgcatgaagtggcattttatgaccattggcacattttggcaagcagatgctctactctcatgcattccagatggaactatgaaatatgaggattttatgtttaatctatcagtgctcaaattctgaaagatactcctccaagttgttccttttggaagctacatattaagtcttgccatacaagaattcttttcctacaggtgacctgccattcctcagatcacccttccttcaaacttgccttcacagcttgggacacattcttttggttatcctcattgaaggccaatcttcatcttctatgggtgtgtttatttttggaaccagccagaagtcatttgaaaccacacctagtgcatagggtgaataaccaagctgcatagcatctttaatgggtcagaaacaggttgtgactacaaaataataatgtgtgttttcttgggtgactctggaagtcatttccaaggagaagcttcaaatatgcttttataaaggacagcagctttggggcaaacatgtggtcttccagggtgaatgcattgaaggtactgatatcctcccctacaatcacaatccacaactttctgcccctcctgcctgaatctctaattttttttttttttttttttttttggagacagagtctcactctattgctctattgcccaggctacagtgcagtggtgcaatctcagctcactgcaacctccgcctcccaggttcaagctattctcctgtctcaccctccctagtagctgggattagaggcgtgcaccacctgtaatgtgcctggctaatttttgtatttttagtagagacagggtttcactatgttgggcaggctggtctcaatctcctgacctcaggtgatccacccgcctcagcctcccaaagtgctgggattacaggagtgagccactgcacccggcctgaatctctacctttaaaatgattccactatcagtgagatgtggcatgggcatattggtttaaaatcagtaccaaaccattaaagtcctattggatgagatcaaataacataaagcaaatagctgaattcattagcttttctctaattaccttgtgttcttctctccttcttctacgtcccaagcttcaaaaggaaaaatctgacaatggcactttttaaagaaaagggaaggaatagtgtgtcacagactggtaaatatgtccacagggatccctataaccattgctgtagcttctacctcagtcacagtggaataatccagagataagtatccttgtgtctttaaaagtggaggtcagagtttagaaaacacaactattcccacatcttgagtagaagtaactataatttctgcacagctacttggccattatgtactaatagttggaagaacttgggtctatggagaaaagagccaagtttcaattagcttctcacaaagtctggaaggcaattgctttttacttactccacttgctgtgtactgtgaattcttatctttacatgggtgatgctattgtctctgttcaatggcccttcattaaacatgacaagtaagtcaaatcctaacaaaccgaaaggttttatacatgcccatgtaatagcggcagatgctatggttgaggcttctggtcttaagatgtgagcaaattgcagttgaggtttaaggatgctatttattatggaagcccgggctatttccatagaagagatcacatgccaacccaccagcgatgcttaaccacggagtggacataggatggggcttctgctgaggccaccttcctcattgtgggacttcaaaggcattaggaggcctccctccttcttcccaaagccatcttctccaatgtccaggctctggtgcttgaaattgtcaccgtgagaaatgtaaaatttattcttttagaaatacgaagttacattgggctacttgaaaattaattatattttaatatgtacaaatgagaaggagaggccaggagcagtatcactacatgcacacagagcaagaagatggactttttgccaaagagggatcccagaggggaattagaaaagcagaaagactgtccaataacaaccccagcccatggttttgggccagcctgttagagcttcctagaagagcagaagatagggcttccacaaactgttccataaaggcaactgttgtcaatttatcaatcctccagcctcaggacattgagaggagaaattgaaggggtaattcaggaaataagccaacaagtttggccctgttcaatggggcttctgataagggacaagcaggagaggggctgaagaatgagccaggtcagcagtaagctacgctgagcaaaaacagatacaaacacctcaaaatggaactcaggaggtagttctacaaatcctctccagagccaccatgtttctcttacactcagtcttggactcccaatgggaatggagtcttggagtcttcagggaccaagccaagtcagaaaaatacaaagttcatctatgctatgtgtttttttttaacttttattttaagttgagggatacaagtgcaggtttgttacatagataaacttgtgtcatgggagtttgttttacagattatttcatcacccaggtattaagcctagtacccattagttatttttcctgatcctctccctcctcccaccctctaccctccagaaggctccagtgtgtgttgttcccctctatatgtccacgtgttctcatcattcagctcccacgagatctatgctatgtttttgactactctagactatcaactcagtctagaatagacaagagcatgacacaatccaggacgatgtaatttaatggtgctagtcttcctgaaaaagctggatccagggcccactcagagatggaatgaaaacctatatatgtgtcctgctctgcagatcaagggagagggcagatgctaaaaccttttgacagtacacagaagataaagcaaagtcagctgagtacaaatgtgttgtgttgaacttttgcattacactcactatcacgttggtgatttgagacagacatgaaaaaaacatggaaatacagcttcttccctcagcctcccacagactctgttctctttataatcaccaggagtctccccattgctttaaccagtagatttgtctgattctcaccatccttgccctggatgctgttgacaactctttcattagagctccaacttcttttgacttctgtgtcctttaaggtgcttctccacttccctctcaaactgcttgcaaccagatgtcatctctgtcctcaagatctggcaaaaccaaggctgaacctcacatcagggactttggagagccccagctgaagtctgtggtttctatcagtggtcctcaaggttcttctattccctgctagcctccattggacagtcttaacaattcctatagctctaattatcatctttatttacccagctctccgacatctccctcaaatctagttattcttctccaggtctctccaatggaaactcattgttgtttcattttctcaggctgaaaatcttcagacccatagtaggtgtttgtgatggttaatttaatgtatcaacttgactgggccaagggatgcccagatagctggtaaaacattatttctgggtatgtgtgtaaaggtgtttctaaaagagatcagcatttgaatcaggagagtgagtaaagatcaccctcaccaatgtgggcaggtgtcctccaatgtgggtagtcaaatagaaccaaaaagtagaagaaaggcaaattatttctctcattgaccggtaagggagaagcaggagagggtctggagaataggccaggtcagtagtaagctatgctgagcaaagacagacacggacacctcaaaacggaactcgggatctagttccacaaaccctctccagagccatcactgtttctcttacactcagtcctgcactcccaatgggaatagagttgagctgggacatccatcttctcctgccctctaacatcaatgctcccagttcttgagccttcagtctcaaaccaggacttacaccaccagccttcctgattctcagtcctttgggtttggattggaattataccactggctttcctgggcctccaccttgaagacagcagattatgaaacttctcagcctccataatcatataagctaattccttataataaatctctttctatgtatctatacatagcctactgtttctgtttctctggataaccctaatacagtgtgtgatcagtactagtttccttccttttctttccattgttcctctatctctactcagcttccatatttaagccatgcctctaaaacctacccctctttggcctcactctcctccacttatctcagtccttattgtctctcacctcttaattgatcttccttctatttcatccagcttctaggactcctcacaacccaacctgtacacagctgccagatatatcatatggcaaactcccttacaagaaaatctcatgtataatcattcggagcacttccaaatatggccgtacctaactaccttgcagtttcatctcctataaccacacttaccctctgttctaggctagggattgggttgtcaatttctaaacacacctcataactcctccaggcaaagttcatgctcaggaaaactttccctcttcttttttttttttgagacagagtctcactctatcatccaggctggagtgcagtggcacgatcttggctcactgcaacctccgcctcctgggttcaagctattcccctgcctcagcctcctgagtagctgggactacaggtgtgtgccaccatgcctggctaatttttttttttttttttttttgtattttcaatacagatggggtttcaccgtgttagccaggatggtctcaatctcctgacctcgtgatccacctgcctcagcctcccaaagtgctgggattacaggcgtgagccactgcacctggccaaaactttccctcttctatggcctaaacacactcacctgaccagacatttcccagcaaactttatttcagaattatgctaatatcatacagtaatcattgattgaagttgaaactatgggaagtatataaagttttaataaccttctcatgaattttcattagtgttactcttccttatttattccacttacagtattccatggtttacatcgtctttaattaggtgatgatattgcctctgctgaagggcctgcagtcaacaagacaggcagacaaaatttatatcaacagaacatttgggttttcaaggctttgattgagtgctccctccttcttggagcctcttcttttcattctctcacacatctgaaattcgtaattctttatctgcacctttcttgagccacactgatatttgtctatgatgactgtagctttgtctcatccactctaaactgtaaaacatgctgtgggccgagactgggattcacttatttgtgtttctcagtaccgcccacagtacccagcacacactatagatgattgattgcagttgtgtcaatcagataggattaaataaaatggataattgagactggcctataaaattgaaagctttaaaaattcagggatgaggcaagtggggtggggtgtggggtaagattaatgttttgggggagatgtttaatgaacattggcctttcttggaattatagaaaatgaaatgataaagaggctatggaagaacattatggataagaccaaagatctaggggaaagaataaacttgaagaggggaaaggtaaggactgcatttaaagggtctatctggaggacaacatgtcaggcataacaagtgggcggcaagatgaaccagtttgggaaaaatacgttttagtccaattaaacatgatgtaatgacctgataccaagtgaagctgtcatatgcgcaacagaaaacctggaaactgagctgagatgagagggagatgtggcagtcatcagcatagaggagctagatctacacgaacagggacgtagaaagagaaagacagagggctaagaatataggtgtttccttcatttgggacaaaaaggggaagacagctaacaagacaacagagaacaggtaattagagatattacaagaagacccagagtgtgcagggttatggaaatcaatgaaggtgtattttaagggaggagtaggtatctatatcagcaaggcagcagcagcagagaggttgagaggagagaatcactgctctttgaacagtttctgtagaagcagtttctgtagtttcttcaggcagtttaggagaaagggaagcagaacattctattctgatgagggtgagagctggagatagcagtgaagtctggggaggctttgcaaaattgccaagggccctgtagtcaaggcaaggtaagcatgggtattgaaggccaggtttcctgcatggcctaccctgggtgggagtctcccagaaggacgtccttccctgtctacatcagtgtttctggtgaagcataaaggcttggctcagtcatttacttcattttattctcctaatgaaggggtatttttatgaaacagccatgatgagtaatttacaatgcatgaatatgaatgagaaacatttattatgccagagaaatgaagtttattgggaagtaaatgaagtctcctccttgcattccagagaatgccaaagaaaaaaggaaaacaggaaatgcagtagtacgttcaggaaacaccttaagtagtaactggagctcagattacagggagctgaacatctttagaaacaaacaggctcgaccctcaacaggaaggagttgtccagacattggaagttgatgatgtgtgtctttgcttgggtcaggaaagcttttcagcattctagaaataacatagaggcaagatgaggtttcttgatgtcagctgagctccagaaaagtcaggacttgaggatccttcctgtggttgatctaaatggctttgtagatgtcttcaaagaggatacaagcttttcaattacagcaacccttttgagaggtgccacagggtccacaggagttgccactagcattggtggtggcgcatgggttgcaggggagcctaggaggacaaggaggtttagaatggctttaggaggaggttttaatgcacacaataccttgggcttaatgacacaacctatgaattctcagtggctggagttagttggaatcaagttctttttgttttgttttgttttgtttttgagacagggtcttgctctgttgcctaggctggagtgcagtggtgcgatcttggctcactgcaagtgggagccaaggctcactatgcctcccaggttcaagcgattctcctgcctcagcctcccaagtagttaggatcacaggcatgcgtcaccatgcctggctaattttttgtatttttggtagcgatggggtttcaccatgttggccaggctggtcttgaactcctgacctcaagtgatccacccacctcaacctcccaaagtggattataggcatgagccattgcacccagccagaatcaagttctgattactaccaaacccttctctctctcccagaatgccatgtgcagaggtggaaaaattgtgcttttcaaaaatattatctcatactcttgaggtctcctggaacttaatgtgccttacacaaatgttattcctacaactggccagctcctgccaccactcctccattgttagccccctgagataggggctgttcccttacctttggcctccctttgcttagctatcacagatcactggacacatgctacacagttaatgtgtgttgcctgactagttgaaaacatggccaccatttgtgtgcctacaatatcccactgtacacattcttcccagacattatttgccccatactcacttgcagtcctcactctccaggaggctccggtacgtgttgatctcacactccagccgggcacgcacgtccagcagcacctggtactcctggttctgccgctccaggtcacagcggatctctgccagctgagactccacgttggtgatcaggctctgcacctgggacagctgggagctgtagtgggcctcgctctccgtcagcgtgttttccagagagtctcgctgtggtggggaagatcaggaatgtcagagagctgctccttcaaagggtttcttcacaggattacaaggaagtcacaagctccaagagctaaggagagtgtgtggccccaagcacatccccgggactctgcctcccaagttcccatcgctcaccagcaggtctgaacaatacacaccaggttgtgctgggcctgcagctcgatctccagggcgttgactgtgcgtctcagctcgatgatctccgcctggcaggactgcagctgctctgagctggataccacctgcttgttcagctcctcggtctgaaacacccaagtggggaaaggatcagaccctgtctccagggccctggggcacctcgggtcctgagtggccatgtgcttagatgcccacctgcgtggcgaaccattgctccacttccctgcggttaatttccaccagagcctcatactgactcctggtctcgttcaggacctggttcaggtccacagtgggggcagtgtccacctccacgttgaggcggtctccaagctgggagcgcagggtgttaacctcctgttggagaaaagggaaacaatgaacctacggcaatggatctgccattttcctgctccagggaaatgagcacaatactgcccaaaaagcactaaaaggaatattctgatcattcccaaagagtgacacacacattttatagcaataaactccaacagggatcacatcaattgctgtcccatggaagatgtgccatcttcctgctctgggaaaatgagcttgatgctgcccagaaagcactaaaaggggccgggcacagtggctcaagcctgtaatcccagcactttgggaggcagaggcaggtggatcacgaagtcaggagatcgaaaccatcctagccaacatggtgaaaccccatctctactaacaatacaaaaattagctgggcgtggtggcatgtgcctgtaatcccagctactcaggaggctgaggcaagtgaatcacttgaaccagggagtcggatgttacagtgagcctagatcacgccactgcactccagcctggtgacagagcatgactccgtcaaaaaaaaaaaagcactaaaaggaagattctgatcattcccaaagagtgacacacacattttatagcaataaactccaacagggatcacgtcaattgttgtcccatagaaacggaaacaacctcacaccttctacaagactaagtctaaactccttggcatatgcaagtccttcctcgcttcccatcacatcttcactttcatcccttggaggtactgcatgcccagccatacccagatacaccctgccctgccacttctgtgtctttgttcaacctcttccctcagactgaaacacccaagtactggaatcctcctctttgcatctgagaagagttccctatctcctcttgggcagcctggattatttctagagcatactgcttgtacatctcatatggtacttgtttcactctgtcttgtttatatcactgtgtttatatgactgtctttctatactagactgtgagctcttttaagaaaagggccatgtcttatttcttttttgtccctccatctccaccaccaaattcaggacctagcagtgatcagcagagagcagggctcaatgaatgatgtccctcctcagtaattccaacacctgcctaaccctcacccagccgctgaagaatgagcagctcactccactccttgatatggatgtagcaccgtcactctctgagaacatcttgagttcctcagagaagggtcccagaccagggatccagacagtaatcctctcctgattcccagtgctagtagcttagttctgaggcctgcttttgtgaatttgtttcatacctcctcatggttcttcttcaagcagatcagctcctccctcagggactccacctgggactccaggtcagacttgcagagggtcagctcatccaggatcctgcgtatgctgttgatgtccgactccaccaacagcctcagggactgctccgtctggtacctgcacgtgtcggagtgggaggataagtcaggaaagaaaaccaccttcccctctcatgtgttgtttgggtagaattggcctgaatcttcttgaacttacagttttctgcctcttctcttccatatgcttcagtcaagctgtccatggataggctgaagaggttccctgactcacctaacaccacgaggagcccacaggcacacatgagatgaagtctctcactgtgttctcggttttgttagctaatataccaccaaatcaattcccaaagaacaattcatttcaatctctgaattttgtggtttaagaaacacttccaaaaaaaaccagtatagaccaaagagcaggcagcacatgagtctagttccctatttgaaactaattttacataaccagccctaggaggagaaatagagagaaatggctttctcctctcttccaggcaatagtaggtccctagggccatgaaagaaccatagggaccttgaagttcaacatacttgcttctgaagtcgtcagaggccagcttggcattgtcaatgttcaccaccagcctggcattctcagccttggcacacagaatctgaaaagaaatttctctcatgaggtacacttgaacttgaaaatgtcttactgttcaaagagagccagctgctgctggccccccatatggccaaccccctcaccttctgctggagctcctcaatggtcttgaagtaggactggtagctggggcacagcaagggctcctgctgctgggaccgctcctggatgagtttctccagctccgcgttgtcccgctccagctgacgcaccttctccaggtagctggccaggcggtcgttcaggaactgcatagtctccttctcgctgccattgaaggagccctcacagaaccagttgcagttgctcacattggcggggatgttgcaggccccaggcagggtgtagccgtggcagctggggggcacgcagggccgggaggagcagctggtgcggcagcccaggctgggcaggcaacaactgtaagacatggtgctggaacaggtaatggaaaagcaggtaagctgctggaggtggatgtgggcaggtttgagtctctccttcctctgcagtccttttataccattaattgtgggtgggggcttggcatacagcatagtttcctttcctaatgcttcagctaatttttctccaaaatatgctagttagatgcttctaaagagtcccccctcaacccataaaattattccattcagcttatgtcacaccaggctcttcctgggtgctagtggttggtgaaatcagagtttcatcagatggcttcataggagatagaatcatcacagccccaaaaggctgtctgcattactcagaggggaggacagccagggacatggggtggagttgtttgggaatcagggattcctcacccaggagtttccgccactgttctttctccccagagagagagctctgagagagagctttgagagttactcttccaagtagctctttcctcccacattcatccatgtttcagcattcaatttgtttttatagcagaaactcaacctgtattcgccgaaatgatcctgagccttactattcgttggggtttagggaacttgccaacacatggagcaactgaaaacaatggcatgttcatggttgagaaatgagaaagtaaaatggaaaccaatggaatggatgggagtatacctaaaagagggcatctgcaaatggcagcccacacgtcaagtttaccctgctgaatttttgtaaataaagtttttgtttgtttgttttctgtttttttttttttgagacagagtctcactctgtcgcccaggctggagtgcagtggcacgatctcggctcactgcaacctccacctcccgggttcaagcaattatctgcctcagccccccgagtagctgggattacaggtgcccgccaccacacccggctaatttttgtgtttttagcagaaatggggtttcaccatgttggccaggctgctcttgaactcctgaactcgtgatccgcccgcctcggcctcccaaagtgctgggattacaggcgtgagccaatgcgtccggcagtaaataaagttttaatggaacacagccatgcccatttgtttagctattgtatatggctgcttttgtgctacagtggcagagttgtgtagttgtgacagagactatagtgtccacaaagccctaaaattaaaaaatttgccaacttgtactaaagcaacagcctctctaaagatgagcaagagtagaaatatctagaagaaaaaatatgctggaaacagtctggagcagtgagagttcagatggcagcactgaagcatgaatatgaagcataatactgcagactcaccaagaaacgaaaattggagcaagggtgctcagaggtatctttgtatccatggtggctttttctcaaattctctggaaatttctatcatcttatttctagacttgttcctctttctagagtattaactctcctagaggtatgactatgccagcctgagatgcttccaggacaagccacagtgcccatgagaatgcagatttactctgttgtccctacaagtagacactgtctctgataagtgtgcttctatcacctctgggatccagttaccctttgactcttgcataacctagggagcctctctattgcccaataatcactcttcacagaatagccttccctacctcacttcttttccctgtcactctaccttgcctttgttccgcagggaaacaaagtcatgtttcagaaagaagtcccaaaagattatttgtggaacacaatacaaatcatttaaagaaggctgcatctgaatttcaaaagcagcatgagaggagcagaaaagcacatcttcgattttatttatttgagtgtttcctctttttttcttagtctatctagaggtttgtaaattttctgtgtctttcaaaaaaactctgtttcattgattttttgctattgtttttctagtctctatttttatttatttctgctctaagttttatcgtaagtatcataataaaatttagagcaaaaagtgttattatatccttcctgctgctaactttgagcttagtttgttctttatcttttttaattttttaatttttgtaggtacatggtaggcgtgtgtgtatgtttagatataggtttatgtatatacatatataaaactttcctcttagtactgcttttgctgcatcccataaattttgatacgttgtgttctcattttcatttgtctcaagatattttctaatttcctttttgatttcttctttgacccattgattatttaaatgttttttaatttctacatatttgtgtatttttcagtttttttcttatttccgttctagttttctagtttcattccattgtggtaggaaaagatacttagtatgatttcaatcctcttaaattcgttaagacttgttttgtgacccaacatatgatctatcctggacaatgttccgcatgcactggagaatatgcattctgctaccattggatagaacgtgttatttgttaggtccatttgttctatagtattgctcaaatctgttgtttccttgttgattttctatctgaatgttctattcattatcaaaagtgagttactgaattcttctattattgcattgtccatttctccctttggttctgtcaatgtttgttatatatatattaggtgctctgatgttgggttcatatatgtgtgcaattgttatatcttcctggtgaattttttcattattatataatgttcttctttgccttttgtgacaatttttgacttaaagactattttgtctgatatataagtacagccatcctgctgtcttttggttaccatttgtacggaatattttttttcccattccttcactttcagcctatacattgtctttaaatctaaagtcagtctcttctagatagtatgtagatagtacttgttggttttttgaaaatccattcagctactccatgtcttttgattggagagtttaattcatttacatttcaataaattattgatagggaaagactaatattgccattttgttaattcttttgtctttctcagagttcttttgtctctcttttcctatcttgctgtcttcctttgtgttgcatggatttttgtatcgatatgtttttattcttttttctttttcttttgtgtatcttctataggtatttttttgtgatcatcatagggcttatatgaaacaacttataactgtctgttttcagctgataactttcactgcatacaaaaactactcttttgcttctcccacacacatcttttatgtattgatgtcattatttacatcttgttatattgcatatgcattaacctatttttatagttatagttatttttaatacttttatcttttaaattttatagtagagggccaagtgtggtggctcacacctataatcccagcacttttggaggctgaggagggcagatcacctgaggtcaggagttcgagaacatcctggccaacatggagaaactctgtctgtactaaaaatataaatattagctgggcgtggtggcaggcacctataatcccagctactcaggaggctgagacaggagaatcgcttgaacccgggaggcggaggttgcagtgagccaagatcacaccactgcataccagcctgggtgacaagagtgaaactctgtctcaaaaataaataaataaataaataaataaataaataaataaataaataaataaattttatagtagaattaaaagagtgatttacctaccaccattatagtattacagtagtctatatttatcagtatatttacatttaccagcaagttttatactttcacatgcatttatattactgtttaacatccttttgttccaacttaaagaacttcctttaacattttttgtaaggcaggtccagcgatgatgaactacctcagcttttgtttatctataaaagtctgtatctctccttcagttttgaaggataattgtactgggaatgatattcttggttggcagtttgtttgttggttggttggtttgttttcagcactttaaatatattatcccatgtccttccggcctgcaaagtttctgctaagaaatgtattaattaccttatggaggttcccttgtacatgatgtcacttttctcttgctgctttcaaaattccctatttgtctttgacttctgacaattcaattataatgtgtatcactttgatttatctgaacatcttatttgggatacactgggcttcctggatctggatgtcaatgttctttctcaggtttcaggagttttgagccattattttttttaataagttttctaaactttctctctctcttctccttctggatcttcctaatgtgaatgttggtctgcctgatgatgtcccatacatctcttaagctttctttactcttttttattcttttttctttttgttcctctggataatttccaatggcctgactttgagttcactgatcctatctcctgcttgatttagtgtgctattgaatccctctattgaatttttcaattcagttattgtatttttcagcagcatgatttctgtttggtactttttgtattttctgcctttttgttgaaaattctcactttgtgtattgttcttctggccttgcagagcatctttaattatggttattttgtttttgttttgttttgttgagacagagtctcgctgtgttgcccaggatggagtgcagtggcatgatttcggctcactgcaacctccacctcctgggttcaagcatttctcatgcctcagcctcctgagtagctgggattacagttgcgcaccactgtgcccagccaatttttatatttttagtagagatggggttttgccctgttggccaggctggtctcaaactcctgacctcaagtgatctacccacctcggcctcccaaagtgctgggattacaagcatgagccattatgcccagcctgtgattatatggttattttgaattctctattttgaatatatggttatttcaaattctctttcgggtaaattgtatatctctttcattggggtcaacttcaggagatttatcttgtacctttgtttaggacatatttccctgtttcttcattatccttggatctttgtgctggtgtctgtgcattagacaaaacagccacctctcccaatcttcacggactggccttgtactggagaagaccttcaccaatcagcccagccagagatactggggacctctcaaatttttgtgctagtccaaaccaccatctttgcagcctccaggcatcttgagtatggctagtttccatagcactctggcacaggtgagacagaagcccatccctgatactgtccacagaaaagacagaatattggacacaggtctaactctttctctctccagggagagcctgggacccagggtttttcactggctcgctctgaacttggccgggggagagggctgtggtgaatattcatatgctagttaaaattaccctctttgttctcaatggctcctagacgtctggagtatgctggattccatccgcattctaagacaggcaagacagaagctagtgcattggcagctctcagaaaaatctgaatgttgaatgtatggtccagttatttcctcctctccctgcaaagaagctgggagggggatttcctcctaaccatatgatactatgctgagaaagcagggattattgtgatagagtatcttaaaatctttctaccaactttgatttggctggttttacactcatccagggtgcaagagcctctcaaattgttactagatttctcacaaataaaatttatctgagtattattattgaattagtgtgcccatgacggtgaggagggtccagggctgcttattccctcatcttgctgatgtcactctccaaaaaacacgaatttgaaattaaatgacctggatttacatccttacctatgatatgagctcagagaagttcattcccttttttgagtcttgtttatctcatctcttgaattgaaataataataatgctgcctacctcatagttttgtttttttgtttgtttgtttttgtttttgtttttttttgcaaaaggtaaggtattgtgtgtgaacatgtttgggggagggagtgatgatgtttatttccataaacttcattgttcctattgttgacccaggtggctcagatgaagaattttgtgaaaattctacttcgttaagcagacaaattgcccattgcccatcccaacccagtggtgctcaaacttcacccacttaccttgtaagtactaggggcacagaactctattcataaattaaccatcaaaatgcaaatgttaacattaacttagtggttgaaataggaagttgcagataaccattacctctatcttctctgctaagttcctgatcttgtgggtttggttatcttatttggggtagttctggaggaggacaagttctccacatgaaattgtaatatcaccaaagcctcttttctggtactgggattgaaatgtgcttttgttatcctcttggaatcttctagccttatagctctgtgcaagcatttgtaataatgataataatggcagtgttgttgttgatgatgattctgccatttcatcaaggcttattagatgccaaacaaggcactaagcactttggcacatttctcatttgattctcccaacaactgtataaagttggcctattattcccatgttacagataaagaaataaactgggaaaggctccacatttgccctagatacaggcaataaatggtggagcagggatttgaacaattcaggtttatgactcctgatcatgaacacctaaacacagtacaaaacctttatatttggcacagaggtttctctggtttgtgagggaaatattcattgcttcccattgccccttacttcgtagtttttccttctggtcccctctagggccctgttccccaccccttcatactccatcattcctccaaaggcctctctgcccaagcctttgagcacccagctaatctctatggtaccttcctgaactaaggccaagtcttactcatttatttttctccacagggaaataatcgtccttttgcataattgatccaaactggaaactagattgtcttttctgaatatctaagcaaattaaaatgcataatcacatgacctaagtgatttagaacttagaagaaagactacccttctaaccatgagttttaatcctgtaaaagttcatctcagaagtaaattcagtttcctacaatcaaagaactctaaagctagaaggacctgaatttatggaggagaaaactagtgcccagacagtaaggtagtaaggaaatgaatatcaatcaatcactttctagtcagatagtctactaggtacctttgcatatagtatttcatcctcaccccagaacctgagtgttcaggttccatttttgtcaccatgtagcagagatgaagaatctgaaatgttgggagtaaatttaactcattcaaaatgacacaagtaagcaggcttcagtcggcctgacccatcatatttattgtgagttagagagatgagacactgacctaggccaggctgtgacaaaacataacagctgggagaaaatgcagaagagagatcatggattccaataccagctatgagcaccagacaagacacacctaggcttcctgcacatcactttactcctcagcaaactgggagtttaaaaagtaacaaatcccatctgggcgcagtggctcacgcctgtaatcccagcactttgggaggccgaggcaggcagatcacgaggtcaagagatggagaccatcctggccaacatggtgaaaccccgtctctactaaaatacaaaaaattagctgggtgtggtggtgggcgcctgtagttccagctacctaggaggctgagggaagagaattgcttgaacctgggaggcagaggttgcagtgagctgagatcgcaccactgcactccaacctggtgacagagcaagactccatctccaaaaaaaaaaagtaacaaatcccacaagcttatcatggcatggcttggctcctggaagtaacgggatgtgcttatatagaggaaaatgctgagcgctcctggacagcctgctgttcttcctgcagatgctgacagcagcctcaggcctcaaaaaactcaaatgatggctttaactccagatgtaaggatggaaaaaaaagtgccttagctccatcccaaagtaaacataaaatttgcagggaaacagaaaggaaaagaaacagcaaaagtatccaggagataagcctagggaaaagtcaaaggtcggagagtggtagatactgccggctaagagtttagaccaagacagctcaggaggcaataaaacaggtcaccaaagagcatcagacatgccaaatagcccagacaactgaaaaaggagctgcccgcccacctatcacaagaggagcctggggccaaaaagtatcaaatatgccgagcagaccatacacttctggtgcacagctgggtttaaagaagaaagaatttatggtgtgaaagacaatacgacaatatgcaaatcctgctgttgaacctaaatccaaaaagaaaaagaaaatgatgatacttttttaaccttaagaaacttagctataccggcaataataaaaattgtcaataatcctaataaaaatatgtggtctacaaagtgtttccataaacagttttccatgcttcctttggcaagtttataaagtaagtagagaagacacggttatctccactctacctttggggcaactaaagctaggagaagccacatgtcttatccaaagacacagagctattaaggtcgtaaatgtcagagctagaatccaggttctggtaagtgagtctcaacctagctcattggaggctcatcacctgtagagcttctaaaactcccagtgaccaggctgaatcccagatcaatcaaatcagactccctgagagcagactcaagcctcaaaaaattgtttaagttccctgggtgatttcaaacacagccaaggttgagaaccactgtcctgccgtgtgtctgatgatgatgacagagcacctggaaataatttgaaagccacatggaaatgtttaaggggaggtatagctacaacgattgagatttttatggtttaaaaaacatggcagaatttacagatcctataaattttgcctccagccagaatttttctttattccaggatgccatctctagtcaaagcacgtttagaaagttctgttttgttaatgtctgtatctttttaatatccagtttgctgataacaaacctttgtcctttgaggataggtttgacttttttgaagctgttcaaagagaaaccttgtgagtgacgtagacaatcaatttggatcatttttaaaaccacctccataggattgtgactcataattgaatctaaaggcagttcctgaagagacttgccaaaaattagtgggaatctgtgcatagggttcaacaatgtgaatgtacttaatgcccctgaattgtacattaaaaatggctaaaatggtaaattttatgttgtacatattttaccacaataaaaataaaatcagaggtctggcaaggttacgtttctctttaaagggtctagaggagaatccttgctttttccaagatctagagatgacctgcattctttggctcatgacccacttcctccatcttcaaatcctgcaaggacaaggcaggttcttctcacatcacatcactctgacctgggtccatagtttcatcaccttctcactcttctgcctccctcttccacttttaagaaccctgagtccacctgataatccgagataatctccctatcgtaaagtcagctgattagcaactttaattccatctgcaacttcgatttccttttttatgtaatctaacatattcccaggttccaggaattagaacatgaacattttgatgagggatggaggggacaattattctgtctaccacaggagctattagcagtacttttgtattattgtaaaataatatacataagcaggatgtggaataaagaaacaagcaacatgagagagagcctctggactgagcttgaccttgggtttggaggaaatcacagacacagggtgaatcatagtagagacagagttccaggtcagaggtttctcacaagccaagcagcaaagcacaaatccaaatccatcctggaacttgagttttaaaaagaagaatcaagggagaaattatggtggagagaatcatcgctttatgaaaacaaacaaaaatatattttttatatatatttatatatatatatatatacatataaaattccgattcacttgatcattttaggacacaggactatgtttcacccaggtggagtctgatacccgctgggaaagcctggtgtggtgggaaaagtcagagacctctgatcccttcagatcaaaatggccctctatgttttcgggaggtctatgcttaaacacttccatgggtcttcatgagagtcaaagaaagatgccctttcttgataaacaccaatgccattgggtaccagcattgtccctttcggtactcagagttccttctagcacccaccagctgttcacagtgccaggggactgggccttataagagcactacttggggactagttttttaacaaattatcagtaagttgcagtcaggaactgtgtgtttcttcatgtgtctctacccatcccaccacccagcgtctgcacagagtaggtattcaacaggtactggttggattgaattgagaaaggccaaaggatcaaataaagagttgacggggtctctaagacctggagtcgaggagggaggacagaagctggaagcccaggctgataatgatcaacccacacaagggaaaggaggaattcctgggtatagcagggcaggtcagagggtttcttcgctgggaaatgcctggaccaccaataacccagaataatacagcactgaacctgaaactcctgctgaaagaacatgagttttccagagcttctttccagcccgcagctcatgcctcctccattcagaataggatacaagcagctctgggagatgtccaagttagaagggaaatccaagaatagctaaggggagatagggactgcagcactcagcacctccaccctccttcccactggcctgcctgcctcgctcctgggtccagggcaccagattcaccatcttcccctgaggcatgaaactgctctggtatccaagagtcaggccattatatggcctgtctttcaagtggctttttatagcgtactcaggtgatgagcacgttgaaacaaatgaatacaaatgaaaaaggcatctgctttgccaaggaaatgatatttattaggaggttaaaagggaggcccactggcacatcagagagttctctgggtgagcataggaaggaacagacccccaggaaggaaagggtgagcaggacagtctggagtagttggggaggctacaggctttgggtgagtttcttggctgccttacgcgggcaactccagccatgcaaatgatgttttcaggccccttttgttgaaccagagccaggtcacagctctggagtcctgggccctgcatccttgctcctctggcattccctaggttctagcgcacgaaggaattgcagggcccacagcgggggcgtggggcacagggtgtgcagggggcaggagggacacaagaggtacagggattggagagacagggtccgatgggcttgctgcacgcgttggtcgtggcacagggattgctgggcagactggagacaaaagaatgatgtggaaaagtgagttaagggcaattttaaaatcatatgccagagatatccccaagggtaagaatgcctgggtcaagggacttgacctggcctagaacagaaaaggcacagactcccctgctacaaagataactaactcaaattgttaatggtctccctgccatagagcaccaaggtagacagaaactctgaaactctgatgtctactctcaaatccattcatgccaaactgatgacatggggtgagtcatttaccttctccaagccccagtttactttcctgtagaatggagggaatactgatccagcccacctggtggtaattataagatcaaatcaggtagcctatgggaatgtacccactaggcaatacagtattgtaaaaagtaaggcattgatcacatatcatgcagtcatgcatattatcatactagaatgcaaagacttggcagtgcaatttcagtttgtacatcaaacaactcttgctaccaaaccatttatgttttaaatgatggccatattatgttgtctgagttctgtttgagcatgtctagtgtgaaggcataatttcctttccaaggtatgcaatatttgcatggtgtctaactgttacactcacacgtgcatcatttcatcaaacacgtctgcccatgtactcacttgcagtcctcgctctccagcaggctccggtatgtgttgatctcacactccagccgggcacgcacatccagcagcacctggtactcctggttctgccgctccaggtcactgcggatctccgccagctgggactccacgttggtgatcaggctctgcacctgggacagctgggagctgtagcgggcctcactctctgtcagcgtgttttccagagagtctcgctgtggtggagaagattgggaatgtcagagagctgctccttcaaagggtttcttcacaggattacaaggaagtcacaagctccaagagctaaggagagtgtgtggccccaagcacatccccgggactctgcctcccaagttcccgtcgctcaccagcaggtctgaacaatacacaccaggttgtgctgggcctgcagctcgatctccagggcgttgactgtgcgtctcagctcgatgatctccgcctggtaggactgcagctgctctgagctggataccacctgcttgttcagctcctcggtctgaaacacccaaggggagaaaggatcagaccctgcctccggggccctggggggccttgggtcctgaggggccacgtgcttagatgcccacctgcgtggtgaaccattgctccacttccctgcggttggtttccaccagggcctcatactgactcctggtctcgttcagcacccgattcaggtccacagtgggagcagcatccacctccacattgaggcggtctccaagctggcagcgcagggtattgacctcctatggatgcagaaaatacaagagttactatgctcagcaaagaatgaactctaaggaatggcattgcttgttgaaaccctgttagtctattttctcggaaaagaaactttgagtggagcagtttgtgacagctcaaggcactccatgtggcatagccccctccccaccatctgctgtgccatggcacttggcttcagaaaaaaatcccaaaagtttgcttggatgccactgaaggatgaactaattgatattcaactttcccagtttacaattggctgtgaggacctcagaatgccaaaaaaaataggctgtgcaatttcagaccatatatcaaaaaactcttgctgtcaagtaagaggtaagagcatgtcatggcccctcccaagagagaggaagaatctcacaaacactcttcaccaatactttgaaagagtagagactcacatttataaggtttgatattttttttcttggcctttgccaaaaaaaaaaaaaaaagactttacaaagcaataacactgcaatgctaggactcattctacaactattgatcaactgcaagcacatggagctgctccgggcaactcaaataatgtgctagtttaaagtgaaagatgtttcctgtctgggaacatgaacaggtcttatctctctccaatttttctcttaccgtgatgttttcaaaggaaaccctcagtcttgtactcatactctgcattctgctgccccaaatcactaaagcaaccctgagccagaggctgagacaggtttgtgcatttctcatttctagtctcacctgctcatggttgctcttgaggcagagcagctcctccttcagggactccacctgggcctccaggtcggacttgcacagggtcagctcatccaggatcctgcgcagaccgttgatgtccgactccaccagctgccgcagggacagctcggtctggtacctgcgcaaggacagggtcagagtactacctggtagatcttcaagactcacaggaatgatttttgataacctcatgtgccttatctttccactttctgtaatgaataggcccaggagacagaggtttctggaggctccatcaatacccaatattcatcccaaaacaaacagattgatgtgagtcctcatccatttttgcatttctttgcttggttctccccagtcctctgcagaatccttcacaacaagtgggtagatctgttttcagatggaaatcccttttctttaaagattaaacagaagcaattgacactagtgcaaattccgaacaactcacttggttctgaaatcatccgcagccagcttggcgttgtcgatctgcaccacaagcctggcattctcagacttggtacacaggatctggggagtgagaggtggcttagtgaggactgaaaataaatatgaaatcatcaactttttaaaaatgacttaagccattttgaaataaaagaggaagcaagaattatgacagcacagaagcaagaaacacacttctctatcacagacagaatcacagcaaactctcttgcttggagatgacagcaatgccgctcaccttctgctggagctcctcaatggtcttaaaataggactggtaactggggcacagcaagggctcctgctgctgagaccgctcccggatgaggttctccagctccgcgttgtcccgctccagctgacgcactttctccaggtagctggccaggcggtcgttcaggaactgcatagtctccttctcgctaccattgaaggagccctcgcagaaccagttgcagttgctcacattggcggggatgttgcaggccccgggcagggtgcagctgtggcagctggggggcacgcagggccgggaggagcagctggtgcggcagctcaggctgggcaggcagaagttgtagggcatagtgctgggagggagggagggagtgcctggctgaagacagagtctaaattctccaagccacagagctgtgggtctccttcctctagggagcatttatatcccactgcagagggtgtggacacagtatgtaatgtcttttttctttttatttcttcacttcttttcaaacgccctttccttcagtctgttatttgccttcctctgaagagtcccttctcccataaaattctttacttgggcttcttgctaagtcaggactcctccgcagacagtccacccatgaaatcagagttctgtggtaggccttcaaagaggctacacagtccagcccaagtatctgccctcattaattgaggtgttgatccatccgatgacattcttttgtgtcacataattctgcaggcccataaacatactcatgtcctggtccacctgccgtttctagggagaaacacggattgatttgaggaagaagttgcattaagaggccacagtggactgtctttccctctgcatttagagaagaatcttcaaatgatggagcattctgtgccttggaagccttaaggtggatgattagaatcaatggaggacacgactgaaaagattagacagcgatttgtgttttacgggtccgtgtaatacttcccccccaccaccacatattacttaagaaaattgtagaggagagaattttaaaggtagaggctttgataactagttggagaacaagaagtttctggggtaagagatcgttttgaaagaggctgaaaagtgcaaaccgagagagccataaaaaacacatttaaggctgggcacaatggctcacgcctgtaatctcaatactttgggaggccgaggccggcggatcacgaggtctagagatagagaccatcctggccaacatagtgaaacccatctctactaaaaatacaaaaaaattagctgggcatggtggcacccacctgtagtcccagctactcgggaagctgaggcaggagaatcacttgaacctgggaggtgaaggttgcagtaagccgagatggtgccactgcactccagcctggtgacagagcaagactccatctcaaaatacaaaacaaaacaaaaaaaatgcatttaaataatctaggaaagatattcaggggcagagagaaaggaataaggaggtctttgtcaaacatttcctaaggttatccatagtatccgaacagagtagatggatatgttaggaaagtcaggagatagcccaaaggggcctccacggcctgaaatcacttgtagttgatctttaaacttcatatgaattgaccctatattccataatatatccatgttggctttaatctttatatatatatatatatatatatttttttttttttttcagatggagtcttgctctgtcacccaggctggagtgcagtggagcgatctcggctcactgcaagctccgcctcccagattcatgccattctcctgcctcagcctcctgagtagctaggactacaggtgcccaccaccacgcccggctaattttttgtatttttagtagagatggagtttcaccgtgttagcaaggatggtctcaatctcctgacctcgtgatccacccgcctcagcctcccaaagtgctgggattacaggcgtgagccaccgcgcccagccagctttaatgtttttaaaaagccccttttaaatttccagttaaactttcaaatactttgcttaattctctaagagaaatggatacatcaggaagatgtaccatattctgtcctgggcttcccatctccagcccgagtggagatgccacctgctttaagaaccaaaggtctaaaggtaccaaaggaggtctctgtggttgtgtaattaaatccaaggacctgggcaccaggaaagaaaatgctgagcacggcatgagcaagggggttttgcaaggcaagctggagtcatttggggttgctttgggaggtgaaggaaggcactagaagatctgaggaagaggtagccaaagttctgaatatataaaagttgcagcacccccatctccactgtggctttggctgccagccagagctgccgttttattgacaatttattggagtgcttctcccattgagctttcatgatggtattcatgttgcactctgcttgagtctcagataaaaggtccttcatctacactccccaagaccattatcactgcttattataatgccattcagatgaaaagccccacagcactacaaagaagatctagacttataataaaatcaatactttcgtttccttacaagacaattaaagggggagaaataggcgggtctacagactgttactcctgagactctccagaggaaggacgcaaggctaggtggcagctgtctgtggggagcttctgtctcatttcatctgggcttgggatgaatggaaaggctcgtgcatctgattgatgagcactagcttgtagatgacagcataggccttctgcttcctaactcttgtcagcctgctccaagcactggctttccagcaagcagctatttcctcagccctttcttcttccccagtcaggcaggctttaacctaagcccaaactaaatgccagcagtattctccaagctcttgattcctatctactgattggctggcatagcctcatggagactgtagtcaaagaagagtgtttaggctctaagtatgagaagattcaaggattgtattgacaagagagcaaacatagaatttttgtacaatgcagagagatcagagaaatggaaagagacggagaccaggagagacaacaagaaaaagaagagacaaggaaaaaagttgggaggaatcctcagcatcatgcagcaaatcagacaaagttagcccagcttccgaggggctaacctggaaaatgcaaagctgagaagaagccaagacaaaataagccaatagactgaggagtggcccaccgtgctgagtgtcctgcaaggcgtaaatggagttgactcataaaagatctatggacacaggactacagcttctgaggcctctgaaagaagtgacattgttccaagctgtccagaccgaagcatcacctctgtgatcaagcttgagattgtttgtggctgagaaatatactgccatctacacacaggcagtgtaaagtctaaaaggagcgacactgcctgttcctgaaggaataagaagtgggaagagaagaaaggagaaatgaagcagggagagtcagtcctgcactggctgcaggtcatggccagtcagcagccacacagaagatgtaggagagaacaagaaacccctgttatcttctggttactcctagatattcctttttctacctgctggttgccctgcagaatgtgaaatggcacaagaattcaagatggggaccacagacagactagctggtgagtaaacacaatgctgccatctcttgtgaatctagcctctttcttgcagtgttttcaagatctcaatgggcttgagtgaatttgctccttgaattagtggggaaaatgggaccccagggttgtaagatccccatgacctcacacaggcgaggggtagaattcatgtattctcttggtttcctagttggaatatttgcaaatttttttcattcaaggagaaattgagcagtcaatgggctatcaaacccacattcattatccagttcaatttaattcagaacacattgattagacagcttctctatgctgagcatatgactaaacagaagaatcatagttctggtgaaaaaaatgtctttttatgaacaattccggccaagatgggtcctcaatatgtatgagaaatagccagaagttaaggaaaggagatatttagaaggtgtaagatgggcatttagaaatatgtttgtattcagtgtaaatagaaaacgggtactgggtgcagtggcttgcatctgtaatctcagcactttgggaggctgaggtgggagaatcacttgagcccatgagttcaagactagcctgggcaatatagcaagaccccatgtctacaaaaaaaattaaaaatgagtttcaaaattagccggacgtggtggcacatgcctgtaatcccagacacttgggaggctgaggcaggaaaatctcttgaacccgggaggcggaggttgcggtgagcggagatcacgccattgcactccagcctgggcaacaaaagcgaaactccatctaaaaaaataaaaataaaataaaatttaaaaatgagccaggcttggtagagcacattttagttccagatgctctggaggctgaggcaggatgattgcttgagcccaggaatttgaggttacagtgagccatgatcacacctcggcactccagcctgggcgacagcaagaccccatctaaaaattaaaaataaataaaaagaaaactgtacatgtgacattatgggcattagtcacttgttgaacatctactgtgtgcttggcacagtcccaggggcaggggacatggtggggagtgggggtatgtcatgtccctgcccccaggaactctgagtcctgctgagcagacaggtccacagctagcataatgtaatgtgattgggccttcccccaaaaatatctccttcccctacccactccatttcttcctacacccacccctgacccaaaccccattcagggcattccaatccagctcatgattttcagccacacggcgaggggatgaagccatttcaggttatgcacttgatcccaaagagttttttgtgcttcgctctctaagtgactcataagcagaattcagagaactgttctcattagaatcttgttccctttaataatctagtcttcagccaggcagggtaatgaattgttttggcatctggttcttgttgctttggagaccacaggagaggcggtggtgatggcccatcgcttcagccctgtggcatccccacaggatccatgggcatcaaggtaagtttcaaagcaaatgaaagaggcttttgccaggtgcagcataggaaatcattccagggatgtggtgtgggcagaaaaagaaaagcacctacagtaaatcaagcaaattgacagaggaaatagaaaggggaataaggctggtggagggaaacggagggagcacgcagtcctgctggtgagtggacacagttgtgcccccttgagaccagagaaacctcctgagggcagagggccttggagaccaatgtgaatgactgaggcaggttgtataggatatccaagaaccagggaggaaggaagggaaagggaggtttggatgcaataaccagcatcaaacgggggagcctccaggcaatggccaaaggccagaagctgagtctaaaatgctgattggggacagcaccgagaaggtcacccctagggagatcccagaccctaggatacctttcccgtaaaatccatccaggatttcagagtggtctgaacgtgaagttttatccacatgtacctccagcaaggccctcacagttgggaacagggaaagagcagggaaaaagaaatgagaagacttggggttgagtgcgtggagctgcccctcacctgctgtgaggtgcagagggggcatttcacctccctacacctgtacttctcccactgcacgatggggattgtgatgtctgttcccctctctcaaggttgtttggggcctccatttggatacaacacaaagtactttaacaagtgttttgtaaatggtgaaacaatgaacatctatagggattctgtttccctcctcctctttctcaatagacaaggtggttttaaaatggcaggaagtgagttgagcttctttgtcaactcctagtttattaaaattgccagagtcctcaagcttcaagatcctgtgagatactaaaggacttttattccttgtaccaccctttgtggcataaattctcagaaacgtttcttctaacataaacatactcatttccttcaaggaaaggaatcaaaacaatggggtcattatgattctatcatccttttgacaaaatctgagacttggcctctgtaaagcacagtagttaagagcacagttgctggaggcaggctgcttggatctgaatcctggcttcaccacctaatagctgtgtgaccttgggcatgttacttagcctctctgagtcttggctacttgtctgcaaaatgagaaaaccatagcattggctttctaggattgttgtaatgattaaatgagtttacccatatgactgtagctataatttagaccagcgcctggctcatagtaagagcttgatggatatatggttctatgacaatgatgatgatggtgaagctatatgatttgatgatgatgatgatgatgattctggtgatggtgatggtaatgatgacctctgtggtttccagggaaactcttcacacacgacaaacacacagatgtgcgtgcacacacacacatgtactgtctcatcaaagctaatcttttaattagaaatgagagagcactggatgtgaacttaagaaacacaggtcaatcaccctggggccccactgactcactttatgtcaccagcagaatcccttaaccactgaatgactcaccttctctctctctcccttaaatgggaaggacaatgcttgcctgtgccgtcatggtgcaagaataagtgggtttattttgttagacagctttgaacttgttggatgaaaggagctatttaagtacaaaggagatgagggcagctgggtcaggtactaaattaagactaatcgagatggctcttcattattgagagcttctcttgggtaggtgcccaaggggtgtgtcacgtgtgccaaaacagttttaccacttgagaaaaagaacagaggaggggagggcgtggcagcctctgacccttcttgggcttcctatgctggaaatcccagtgtctctcaagcagatcagtcctatgtacatgagcagtgaccaacaagtaggacgctgggcttgagagcagttggaggcagagcaacaagattctcacttaagctccctccagccttggggctcgggactgtggtcactccagcaccacaccgctgtatcaggaagacctggattaaaccagaaccagctgtacttgtaaatttttcagcaaactacagtgattcagagaattcacagagggaaagggaagaccaaaaccagctcctaaagtagatttggtggttccacttcaatgcctgtggtttcactgatcaataagacatagaaagcagggacgcacagagttaggggggctacagccatctcaaccagccccatcagttccctaagtgttcccctcaacatccccatcagtgattctgaagcctctgcttgtctccaaggatagggaactcactgcttctcttctctggccagctgtgatgctgaattctggagatgtgctgattctcagccacggctatcaaaatatggagcttttgattcatgttctaccatctgcaaattccaagacagacagttgccataaggactcaccaatgggggttactggggaggttggatgggtcagcttgtttgggcctttctagactgatagaaataactatcatgtaacattttcagagttttgcaatgtaaaagagaaaggctctatcctgatctgatggtatgagggattcctcactggaggacatatcaggacggcaaggccagccctttctgtagagggtctagctagtcaagggctcattcctcaaataaacttcctaacccagtgtttctcaaacttgaaccaacatcagaatcacctgcaagtcatgctaaagcagaatgctggttcagtaagtcaggggtggtgctcaagaatgtgcatgtctagcaagttctcaggtaatgccagtgctacctgctggcggaccacgctttaagaaccactgtcctaaaccttctcatgtttaatttgtttccccctcaaagcttccaaagaacgggctttggatctggttcaaagagactaggtttcaagtcttgactcagtaaccaactgagaataataacagctgcttcttctttgcagggctgatgtggtgccctgtgacacaatgtcggcgaagccccagccagtgccttgttcataatgggcatgtcatcctaaaagctcaatttaagttacctgttctggggcttctgattcatgttctactgtctacaaattccaagccagacagctgccaggacttaccagtggagcttactggggagcttggacgggtcaggttgtttgggcctttctagactgatggcgattaccatcagttaatattttcagagttttgcaacggtctgtggtgccgcagatttgagctcttcctttacacaaggaccaggtggcttatccagataaaagggaaattttacttagcgtctatattttaaaagctctatctgtaaatctgtctccaaatacacttggtgaggtccaaggttgggtatctctcctctgtgccactttgccgcagtcccatttttaactctagccttcactggctttgccatctcccagaaccactctggcgagccagccacaacccccgtctacagaagcatgtggctcaaggagttcccagcaaggctctcagcatgggacggagatgctgaggctggactgcactgggctcattctgctgcagaagcgaagtttaatagcaaaataaaaacaaaagtgcctgccccatctcagagagatcaggaggcaacagaagagagaaaatggagcacttgggacaccttgaggggaagaaacaaatccagccataggggctgagctgctggattcaaacacctatccacagagtggcactgtctctcttcagtctcctgcctggctggccagggaggcaaggcccaggttagcaggcctgcagagcaaagcctaacgagctgaagacacctcccctttcccagcacctcgggctgaggagtgtgtcagtatccagttgatgagcagggcccatgggtggcccgggagcagggggcgcaggctgcaggggctggactaggagtgctgaaggctggggttgcacacgggttgcagggaaatctgcatagagaaaaaaggtgtttgaaacattggcatgagaagtatgtgaaagacaaaagtatattatagacactttagaattaaagtgcaaaagaggaccttagaccttagaggtccctctaagcctgaaaggggcaatgacgtgcccacagtccacagtggagctggggccagaactcagtgtacctgtgtgccaggccagggtcacgtcccatatggaaggaacacagcagagagaaaggcagaaaggccagaggaacaagaatggtccagatgtcagccactgattccatttaaacacagcccctcatagtgttccttagtgcttaaaggggtatatcagccctctgatgcttttcacagggctattgtggaactaaaatgaaagagtcagtgcacatgcccttagcaatactttaaatgctatgagcacaaagaatactcgttattggaatacttctcctggagagaatttagcaaaacctgaatgtgctgggcattcagtattttagccctctatgggagtagccagcaactgggagcacaacgtggtcagcaaaacaaatgccatgacctgaaaactcctgtacaccctcacctacgcctaggcaggcattagctcaccaggcctagtggtagcaagtttgtctccaaagatgggatctgcaatgccacccccacctggcctccagagctccttttaggtcattcccaagagaagttatctgtttttgcacacggtgttgacatagacaacagggtacgtacttgcagtcctcactctccagaaggttccggtatgtggcaatctcattctgcagccgggccttcacatccagcagcacctggtactcctggttctgccgctccaggtcagcccggatctcagacagctgttcctccacattgttgatgaggctctgcatctgggccagctctgtgcggtagcggtcctcggcttcacacagggagttctgtagacagtccttctataatatcaaagaaaggaggaagcaagttaaaaatcatggatctccaacctcttaagattgtgacaccccaagacattgccaggtccagagagcaatctaactccctttagctgtcttcagccagaataactaacacacttcatggtagacctttaagatcagagccctctgacctaagttaatgttgattcactcagcatccacatctacagggaagtgcttccaaaagagttgaaaccaaggtttaagctgagtccgtggttggtattcgaggcctgtactgaccccagagagctactcatgggtagtgggagccaagctgggtctcccatgcgtgcagagggactcaccagtgtgtgctgagcctgaagctccacctccagggcgttcaccgagcgtctcaactccaggatctctgactggcagcactgcagctcctcagagcaggacatggcctgcaggctgatgccttcagactggagcatagagaaacatggtcacctacctgcccagatggaggccaatccccactgcttagcagtccccctcacctgggcttggaaccactgctccacatcctggcgattggtctccaccatggcctcgtactggcctcacgtctcccccagaactctactcaggtcaatggtgggctcaatgtccagctctatccggagcttgtctcccagctgaccccttagagtgtgggcttcctgtaggcatcagaggagtatgacccgcctgcagggcccccaactgcccttcacccaaactctcaactcccactttccatcctccccagtaatttccctgtgctcctctgaagataaaccgctgcctgcaccagcctagcagcttccagaagctgtggatgagaagcaatctcccaccaaaagccagagctcacctgcaaagcttcaatcccaagcagaaggaagcctccgttttttccccccagatgagcctgaattcacctccagaaagtctcaatgcatcacaccaagggtcacacacctgctcatggttcttcttgaggcaaagcagctcctccttcagggactccagctgggcctccaggtcacacttggcgagggtgaggttgtctagcaccctgcgcaggccacagatgtcagcctccaccagctgttgcagcgagcgctctctctcgtacctgtaacagggaaagtgcaggagtgacagttagagggcaggaaggggcaccaggacatgactcccagctcgcagctgtaagtccactggcctgccctttgccatctaattgtgagttggcttatcctgtgtagtgtgctcaaagcccagaaagcaacaggatgttccccactcagtcaatactaagcacctgagatgaaccaaggggagcagctggtactgaggatactgtgatggacacacagccagcacctgcctttacacacaatggcccaaaagggaggtggcaaagtaaccaggcatttgcaacacagtgcaatcactgcaggcccctctctacaagccccatacccaaagggaccctggattccctattagagtaaaagccacattgccagcatgagaggaaggaaatggctttctttagctctagaagagtgagacttgcacagtgccccgaagaaagatgataaaacacaatgcccttccagcacccagggtagaccctcctcaggtggtgtcaaccctttgactttcacatgttttcatcttaggctatggagcatgatttctgctatgaattatcagcactcacaaattaatcaagctgcagcacagaaacatatccttattaaggcaacagtttcacaggaaattgcttcaagaaaggaaaatttggtacaaaatttaaggccaagtcccagctctgccactcggtacccacatggcttctggcaagtcacaccagcaccccaagcctcagggtccccacctgtggaggagattctatccctgcccgcctgcttcacaagttgcttaccaggtggatgatgcattctagcacatgttgtaaactgttaatgctaaaccactggagagcggatagtttttcaggatcttgagcttaatgccctttgttctcttctgctataactactgggttggggtctgggtcaatgacatccgatgccacatgagacagaagcagccaacttggcattgtcccatccccatccaaccccaactctcacttggctccttcccatccctgtccaaccccaactcacttggtcctgaagtcatctgcagccaatttggcattgtctatttgcacaaccagcctattgttctccgatttggtgcacagaatctggggtaagaaagtaggctcagtaagtgacttactgatcccagagacacctatagcctcaggtgagaggaagttttattggctgaagttgaacctacagcatccgcctggacaacacaaactcccaaacgtgcaagagatgcttttgtggtgtgggaaggaagatgtgcaagagacttcttggaaaaggatgaagacatagagtcaaaggaaccaggagatggaagacagtagcaaactgaacatataacaaagacttgctttcattttgccagatatgatgcttagcccaatataaataagaagatctggccggacgcagtggctcatgcctgtaatccccgcactttgggagaccaaggcagatggatcacctgaggtcaggagttcaagaccagcctgggcaacatggtgaaacaccatctctactaaaaatataaaagttagctaggagtggtggcgcacacttgtaatcccagctactcaggaagctgagacatgagaatcacttgaacctgggaggcagagtttgcagtgagctgagattgcaccactgcactccagcctgggtgacagagcgagactttgtctcaaaaaaaaaaaaaaaaaaactaggccacagaacagaggactggctatgaatgttttagataaagtaggatctgttctaaagaagatctttcctctggttgtccaacctccccacaggtcttctctgaatctagccaggtttctgtaacccctattttgacattccttgtcttcttgtctccaaaactaagatgtaggctcttcagaagctttaactggataatcaaaggtgacaatagatatgcataagaggttgatgctgttgtgtggatagacactgccttggcaaggatgttaggaaatattccttttgccctgtttactgcaccagaagtttcagtatactgcaactttcataaactcagcacggtttttgcatggttttcatgaaaatagcatgatttttgtgactacgatttaggaattttatgtgctgaagttaagtaagcatgaactcagaatcctagagtgataaattctacatctcatcctttacaaattcccattcaccttcactcaagagattctcttcccacattaaaagaaaaaaaaaatccactgctgacccagggtcagtaatctttttttgtaaagggtcagatagtaaatactttaggctttgcagaccctacagtctccattacaatgactgaactctgccactgtagtacaaaagcagctgcagacaacatacaaatgcatgagcatggccatgaaccaataaaactttatttgcaaaagcaggtggtgggccggatttggccgacaggcagtaagcagattcctgacccctgatctggtgcaccgcaaacctcaccttctgctggagctcctggatggtgcagaagtaggactggtagtttcggcacacgctggactcgtggcacttgctcctctcatggagtttggtctccagttctgcattgtcccactccagctggcgcaccttctccaggtagttggccaggcggtcgtttaggaactgcatggtctccttctcgtggccgttcagggtgttttcgcggtaggccccacagattccgatgttgccaggaatgtggcaggtccctggcaagggacaagtggtgtggcaggttgggggcagacagaggctgaggcggcccaggggagtcgaccccacacggactcgattggcatgtgccacattagccaagaggcacagagaggcagcgttggcctctgaaacctgcccgctgaggagggaactgcaatggtcagaagtcatggtgctaaaaggcaagatcctgctttgcccacagttggatctgcttgacaccaaaatcttccttctcctgtagaccttatataagccttagtgggtgttggtgcaagaaaactggcattttcctcattaatatttatgtcaattgttatacaatcactctattagtcagtggtttttgtttcctataaagagttaatgagctcatgaaagaggccctaacctctttcttcccatcactgcagggtcctggaaaacagagaaaacaaggtcttcttcaagcagcccactttctgtggctgtgaaatctttccccttctgtcagcttatgtctatgaaataatcaagaactaaaggctcctaaaatgtcctgcaagtctctctcactcccacattcttttcctacctctgaatgttcccaatgcagcaaaacctaaaatattagtcaatcaggcacattgaagaaagggaaaaatcatgatttgtttgttttgatagatatttgtagagtgcccagtgcggaacaaacgcacatctatgctgtcttgtaagaaggagattttagattttaataagaaagataaaaaagtaaatgatcttgatattatgaagacagtaaaaggaagtatttttttttttttaaaagacagctgcaaagatttcgaggtggaagagagctcactgagagaccggaaaaagacttcatggagtaggggattttccaaatatgttttgaatgatattttttataaagggttggggaatgagcttctctcatagagaacaaaataaacacaatcaaacatttggaaaatggaaaatagtctagttgtgttggtatttataatggagacattatccccaagccccggaaagttgcattgagtccaggttgtgaaaagtcttaaataccaggaccatggtcttgaggcaaaggtgagtgaaaggtagggatctgccctggaagacgactttcaagtataaggaaaaataaatagccagcttccttttgaaggaaagtagcagaaaaaaggtggaaagttcctttacacaaattattagaaaactgaaaatgaaacctaagttcaaaattaatcttggtgtttgaaaactaacacagtttttaatactccttgggttaaataagaaatctaatttaaaaatttttaagtattttgaactgaattaaaatcaatacacaacctataaaacagatgttggcaattaagactttccctgtgcatacgtgaaacagataagcgttttgggagtgagaaaaaaacggctcataataaaactgatggtttgcaattttcagaaaataaaattatgcttctgtgtactggagtctacaggctaattaaggcaggcagtgattaacactttatggtgtctgttctcagggcctcacccaccttcccaggcatctttcctttctattgaccctttcaccagactgagtccctcatcacccttgtttacagaagatacgtactcaagaactttgatctttcatcttttgaaatatttttgcatttctttgaaatgcatctaccttgattatccattgcttgggagactctagaacaaaatttaaatttccttaatcttcagacacactcagagcatcagaacctttatggcctcccctatttctaaaacaaataagccagtggccatttgttcaatacaccctggaaaagggcagctagccagcttccagtctatgctaacaaagatgctaatttgaccgcattcctaagatgaatgaattcaccacgagggcccttgaagcagcaagtgtgtttcagctggcactacaacatagcatctccaggacgaaagggacttcagggtcctctagtctagtacccatttgcattaaatcccttcgatgaccttcctccaactagtcatctagtccaccattttccaggagagcttacaccatcagttcctgtggcttacaaacagcttcccaggctttgtgcaagacactggtatccagaaaattaacagcagctagctcagccttaaggcactcacattatagagaatttttagaaagtcttcacaaatctaccttcgtgttacctctccctatagcttttgttgggtcattcattcattcattcaacaaatagctatgaagtacctactctgtgccaaccaggggctgagctggaggctagtaatacattggcaagtaagtcagagagttggccctttagttcatttactctccagttctcccccatggtgtcccatacaggataaatctaatcattctgccatattctcagctctttgtggcagatgtgagatttcttactcctggttctgcattcagcatggttcaaagtccccttgccatcccaggaatgtttccctggacatgctccatgatgtaacagttactatcactcttaagtgcgggctgtacagtgggatttctgattagtttagattgaaaggctgccagtagatggccagaaaaccttcttgcccaggacttttgtgtaaaccatgctggagccactggctattcagccatgacaaccagccagccaccagttggtcccatatacagtcaatgagacgcatggggacccttctctgtaactctatacagatgtgggtgatattctccaaggcatgatttgccttatcctggtgacttactctgaatgtctgatattcctgaactcctgttataccaaagcccttctcaaggggatgggggatgcagagatgaaaaggagaaatttccaccctcaaaaagctgagagcagaaaaagaggtcacgtaactcagtggagggagaagtgactggagcttagagatatagaggggccatcaaagacactttgtctggaacttaagattgggaagacttggatgggcaggaaagatgggagacagttttccagaaaaagaggatgaacaggccaggcgcagtggctcgcgcctgtaatcctagcactttgggaagccgaggcaagcggatcacgagatcaaggatcgagaccatcctggccaacatggtgaaaccccatctctactaaaaatacaaaaatttgctgggtgtggtggcacacgcctgtagtcccagatactcgggaggttgaggcaggagaattgcttgaacctgggaggtggaggttgcagtgagccgagatcgagccactgtgctccagcctgggtgacaaaaaaaaaaagaggatgaacacaagaaaacactcagaagcagaagtgggctcaagagaactgggtacaacttcagaaatgcaacagccaacaacaggcctgtcccaagtactggacccccaaagaaatgagtttgaatgacacaaaatgtcaacccaaagagccaaattgcatttctgaagcctgtaagagtgaagtttgtactcctctatgctaaaaatattgtctgcttctattttcataacatctccaccagtggtcaaactttaaccagcatcagaatcacccagagggcttgcaaaaaatgcaggttttcaggccccacaccacagtttctgattcaagcggtctggggtcaggccagggagtctgcatttctaacaagttcccacatgacactgatgctgctggtctggggaccacccttggaagacggaatcactgctccatagcaatagacaagttttgtggtgacttcatcctaggtgaatgaagcaccaggtcacaaaacaggatttgatgaattcaagaggagccagtgtttggattactgtacttcaaatcagttagcatgcagttttctccaatgtaataagcaagttctgtttgttttcctagtttgctcttctttgctgaggtttgttttaggaggatatctaggatgaaggagagaggagagacaaaaaggaaaatatgcacactgtgttgcttatgcctgtggggaagaggccagtccacgcgaaaaacaatgttcataaaggacagataaaggtcacatgaagtaatatctattgacatctattatgtgaagggaaccgagcttggcacttggtatacaatattttacttaattctctctcacacattcacaaatctatacacgcaaattagatagacacctactatgtgcggcctactgtgttattatttgaccacctactatgtgccaccaagtattataccatatgcttcccatatagttgtgtcttttcatccttataaccacactacaaagcagttacaagtatcccactgtagagtaaagaaaacaaagctcagagcagttagggatgttgtctgaactcaccaagttggaatgaaaagtatgggccttgaaatgtcagcccaggtctgcctgaccctgaagcccaagttctttctgctctgcccagtgacccagaaagggccagatagtggactctggactgaacacaaggccaacactcctagacgccagctgtccaactggatttattcaacaaatagctatgaagttcctgctctgggccacacaacttgcctgaagagctagaaacagaacagagtcctctggaggtttttgagcagatgaaagagagaatcaaaggagaaattttagaaaattaatccagtgcctgtcaacctaaaataatcaaaaggctcaggatctggttaaaaagagttttttcaagcatggcatgtgagagccgtcttctggggacacacgaacaccgaagaatggcaatcagtactcccagtgcagggggaaaatgaagatcacttatataggcaaaaatagaggtgctgaacagaattacgacgttttccacacaaaggctagtgtacagatgtaagatctgattgaccgctattgattacactctcatggggttgcttaacattctattgtaaaaaggtagcagtcacaagggcctccttctccaatgtcatttactctaggtttgaatacagacaagggagtctggttactatgcaacatgtcaacacacaagtcaggaagcaactgtctttgcaggagagaagaagaacagctatatcgcatgacccagtttccaaggcttaatttttcacttcggcataataaatttagaaagccctgacatttcattttcttttttgtttgtttatttgttttgtttttgttgttgttattgttttagacggagtctcgctctgtcgcccaggctggagtgcagtggcgtgatctcagctcactacaacctccgcctcccgggttcaagtgattctcctgcctccgcctctggcgtagttgggattacaggcatgtgccaccatgcttggctgattttgtatttttagtagagacgaggtttcaccatgttggtcaggctggtctcaaactcctgacctcagatgatccacctgcctcggcctcccaaagtgctaggattacacgcgtgaaccactgcgcccggccccattttccttttaccactgcccagtgtgcaccctggagtgggaacactccatcttcatttcgtatgctctctagcatgcaatacagtgccttgtacataatatttactcaataaatagaacacaaaagagtgaagggctggtggtgtgtgcagaacaaacctggcacagaagagagcaggaggaggctcttacaagaatccaggcaggatgtgatggaacccaaaaccagccaccagcagtgctgaagtaaaggaaggcacaaaggacatagatgctgcagaaggactctacaagacagggagaattactgtatatggggtcaaaggaggaagagaaaccgaaagtggccccaaggtcacccccaagttcctaggacaattgtgtgcttcaagggagctgagaagtcaaaggaaagagctggctagagcgggagaagctgcattcaagtttggagaggatgagtgtgaaatatagctacctgggactggccactagggggtcacagacaaaggcctggggccagggcagagcagcctgggtcactgagaaaccctcctcctcagaagctaaaacgtattacacctggcaggcaggtaaagcaggtaagcttagcccaggggctcatacttgaataggaacggtgattctaactgggagagtctgtgtatcaccccctagccccagtggggaggtgatgtttggaatatctaaaacagatggcagggaagttattttagttagaggaagtgtcatttgaaaacaagcataacctgtatttgaaatgagctgtcttttagtcatgatacgagtttggtatttacatttttgaaagttaaaacattaagtgagaaggcaagatatctttacatttattaagtgggaaggcatggttatgaaacactgaattaggtagaaaaaagatacattaaaaatggtttaatttaaacaggctgagaacttcatgagcttcaagctgagctcatgaagattataagtggccatgagaacagatgaaattgattttgttcttggtcaggaagacaaagagaagatgctggggggaaggaggggagggtggggcacacaccatcagccttaggtatcacatatcatcgtctacaaaaaaactatccaaataaaaaatgctcctgttcaggaaagtccagaaattcacttcaatcttcttggcttcccagtgtagacagtggtgggagcaggagtgggcccttccccagagctctctcggtgactgcagtgtccaccccagcagcctgtagctgtttaccctttctcctttccactttgctggaatttgtgagaaatggcatttggtgtcaaaaaatacataagtgcatgggcctcatgagccgcaactgatgttaccacgtgaaggctgggaagaaatatcacacatcagcccacaggcagtgcaggattggtgaactgaagagggacgggctaagcactaggtggctcagaaccagatgtggcccccagccaagggagcagaagcctcaggagaaggaaaataagagacacctggttgcagttattgtggccaaagcaaagcctattgtgccacattcagggctatatccatccagtcggtgagagtatgtgaggcagagaggccagggacaggcacagaatgtccaggcgggagaatcacttgcaagaaaagatgtctgggatttggtaccagagggagccctaagctctcaggctaggataacgaatgtgagtaaaaccccagggtccaggtgtcctgactgcactggttacccacctgccagcctctagccttcattttctatgtacctgagtggcacctcctgtcacacctagccatgggacctcataggtagagcttgttaagggtgtgacctggccaagaaaggtggggacaggtcggatctccacaaccccatcacactgagggtcagggagggtcatggccacttcttaaaacatgactcttgtgggttcctcattagaagagcccaccaaacagtcttgtcctctgacagcccaatgaatgcttttttggattcagttaggctacttggagtgagaaacaggcctaatgacaacagaagatggcttttattattgcatgtacatgaacaaggaatatggccaaactttccagccaccaacgtagaatctagggccccgatgctgagagtgggttctgctactatctcttcagctcctttttctctctgggaggaagagattgtacctgctggttcctagggagccccaataaaccaatatccactgaacaccttctagatgccaggaacattagatgcattacccctcaaccacagtgagagggaaatacaactatcctacttccacaaacaaggaataggtctcaagagaatgcagtgacctggccaacttcactcagcaaggtgggttcaaatcccacttcagagtcaccaaggtgggatttgaacccaagtttccctgaccctagagaagatccacctccaccacactatgccaccatgaagaaggaccagtttttcattgctctttgcaccagggcacatggacaagctgagacccaagagtttcattcttctggacacacttggtgcttgccgtaaactgactagcatggcgtgggaggcagcagcctctctgggctgctcctccacctgcttataactgcatctggctgtgaaccaccttggccagtgccaaagccacatctgagaggcaggcagggacttggagtgctctgatggcagcggcagccctcaccgccagcacctccaagacagcagcagaatagacaacagaaacatcagtggcagcatctctctagagaaaactaaagcctagaagtgccccaggaccaagaccccagtctccagtgcccaatctgggcctctgcatttgggagagtgggcgagaattccatggctccatgaaaggggccaactggagtgagaggaaaaacttggcaacttggctcagacaattctcaacacgaccttcctttgacgatattagaatgctaagtgatgtgattttgctcttggacaaaataacaagaggctgaagatgccaaaagcatggtagggacatgttagctctgagctgttctgaaagaattcaaacttggcaactggcatcacttccttccaccagtctatagggatccctgggaaaggtgaatacacatccaacatcaggaagggaccttcatccagaggccccagagcaccccagggagctcctggaagcaagatgtcagagccagtgaggacacaggacctgacgaccaggactctccgacatctcacatacaaccaacaccggggagacagcacttggtgcaggaaggaggtttattgaccatttaatgcagggaacccagttacatttttggagattctgaaacactggaatagaactaaaagtaccaagaagagacaccaggaaaaataattgctttcatggaagataattacaacattttagcaacaacaaaaaatacagcttagaggcataggcagggagccactccttggaagtatctgctaccggttgatttagggaaaatgcctcagtgagtctagtcttgaaggaagactgggcaaggtgagggcactcctgaccccagtgcaaccagcctcaatctcctaactcgggccttcagaatcatctccccatgctggctccatggccagagggagacccaccggtgacagggccacagcttggacaagaagtacaggaggcaggcgtggaacagggattgcaggggagtctgcagggagagaaagaagagttacattaaaaagatgtctcagtgattgatggacaagggtaagatcagggtgaaggctgggcctgccaccaacaaggcacacagaccagagaatctataccaacagttctctcatctgtgtctttctacatccaggaatccttggggaagatttggcttagggacctggctatcatttagagaacattttctcaataatccagtctgcacagaccaggagaggttaatgagtcactgagcaagagagcacaggaaggcttgtttgttaagatgatatcttctgcaagcacttccattacctctgaggaattgcctgacagtcatgtgtgtggcttaggaattgcccagatcacacgtacttgcagtcctcgctctccagaaggttccggtatgtggcaatctcgttctccaaccgggccttcacgtccagcagcacctggtactcctggttctgccgctccaggtcggcccggatctcagacaactgctcttccaagttgctaatgaggctctgcatctgggccagctctgtgccgtagcggtcctccgcttcacacagggagttctgcagacagtccttctgtaatgggaaataatggggtaagagatccaggtgccccaaaactcagcagtgaaaatcatgaccaaactcatcacacatagggcaaattccaaaatgtcataggacattctcagagctctggagaaatcactgtcaacatgaccatgacttctctctcatgcacacaaatctaacttaaggaactgtcatgttcatccctgtatccccagtgcttgacaaaaagcaggcacctcgtaaaatcttgtggagtgagtgcctgaacttccgcactgtgttgtaaaggaagtggacttgattttctgaagaaaccatttccctgggtcacactgaacttgacagcaagacgtctccatcgggtatagaggaccccagatcttgacttaatgttgaaggaactgatttgtgagactttaagagatgctactaccaggacatggcatggggcatttgcagtgcagtgagggtgaaggacacgtaccaaggtgtgctgggcttggcgctccacctccagggcattcaccgtgcatctcagctccaggatctccgactggcagcactgcagctcctcggagcaggacatggcctgcaggctgatgccttcagactggagcacagagaaacacagtcacctccctgctcagatggaggccaggtactccctggctctgtaacccccactcacctgggcttggaaccactgttccacatcctggtggttggtctccaccatggcctcgtactgagcccgcatctcccccaacaccctgttcaggtcaatggtgggctcaatgtccagctcgatccggaacttctcccccagctgactcctcagaatctttacttcctgcagaaatggaagcgatagacagcctgcgtaaggaaacggcctttgatggagcagacagcaccaggactccgtccctggcaagcagtaggaggggagtcccacacataagcaaatgggaaagtcttgtccagagtgcatttgggagagcccacctggacaccttcctcatgcccaaggcaagtctgcactttccacagaggccctctggaccctcagacccacctcagccctgcatccttaggccagctgagcccaggcaatgctctgagagccccagggccggggagctcccctgtctgcccagcgccctccccaggagtctgagcagccagggccacacctgctcgtggttgctcttgagggagagctgctcctccttcagggactcctgctgggcctccaggtcggccttggccagggtcgcgtcatccaggagcttctgcgtcccgcacttgtccgcctccaccagctggtgaagggagcgctcactctccagccttccgtcacaggaggcacagggtcaaaaagaatgccccaatagcccctctcagctgccctggcttcctacctcccacaccaccttggatccttatttgttcacgtgggcagtatacactattctcaaccctgcagcgacacggtttgtagtcaggacattatgcccattgaccagatggaagactgaggctcagaaacaaaacacgagttgttcagaattccatgcccagttaatagtaaatgcatggactcatcctaagtgttctgacttcaaatgcagcatttattctgccataataggagtcatttggccaggaaaaagaatggctaaaaataagcctctggaccttcagtttgctgcttttcctcttggattcattatttctcgttgttttcttgcttttccccttcattcaagcacaactctagctaccaaggagcttcaatgacaattcctccagctgatggatttggccaagagtcagagagtctagcaacaacctatgcattgacagtttatttttgtgatgactcaattttacttctgattgaaaagcaaaatcctcttatcttctagatatgggagaaagtgacataggttctaaccaatctagactacagcccttctttttctttcaatgcttatattctctttcctcctatataatgaccatttctagcaacaggctaatttaaggtgtggagagaaatattcttctagtcaaaaactgtttttgaacacctacaatatagactgagtaatggggcgggcccttggaaatacagcaggagagaagtcacactgaccctcctcatcctgacttacttgatcctaaagtcatcagcagccagcttcgcgttgtcaatttgtacaatcagcctggcattctcagccttgctgcacaggatctgaggaaaacggaaagacggttcacacacaaagcaccatactctaagctcccactccatgtgtggtatttacgctcatgtccaagagaaaccaagaacccaaagctctctggaccttatgcagattcctcctgcgaaggcttctgccttctcagacccagcatgcccaggcgatcccacacctcaccttctgctggagctcctcgattgtacggaagtaggactggtagtcggggcacacggtggactcgtggcacttgctcctctcgaggagtgtggtctccagctctgcattctcctgctccagctggcgcaccttctccaggtagttggccaggcggtcattcaggaacttcatggtctccttctcatggccattcagggtgtttttgccgtaggccccacagattccgatgttgccgggaatgtgacaggtccctggcaagggacaagcagtgtgactggttgggggcagacagaggctggggcggcccaggggagtcgaccccacacggactctgttggcgtgtgccacgttggccaagaggcacatggaggcagcattggcctctgccacaggctggcacccaacatcgataggagagacaaagacatttcttgctccaggagccatggtgcaacccagagggcatgaggaggtgctgtagaaggaggtcatggtgtagggctgaggctgcacaggagcttcagatcagctgggaaggctgagccactgagactgaagcctcctctcctcccaacccttttataccccatcctgggcgggtgttggctccagtgctttgacctcctgccttgattatctacctgttgtggtgccatcatcctgttactcagctgctgagtttaccatgagaagttcctcagctcattaaagcaatgttgacaaatctgagatgcctcttggctcttccatatcaggttagctgttggtgggaagtcagagactcactgtttctgctcaacaaacaccagcagttgattcaggccccaattgctctctctggactatggtctctgtggatgtggtcacaatgaaggctcaaatctttccgtcagtaatttgtgtagcaggagacacagagaaccaatgggacccactggatctttcgcctgtgcaagactgaatcagcctttcctttgaagagaaaatatcagttaataaaaccaatgcatctactgatatttgacgattgagaggcgcctttttttctttcttctttcacattgcatactcccttgagaagcaataacatctggaagcaatggcgctaattaagttttggttgactagtcagaatcagctattcattcatttgttcattcattcattggttcagcatgcttcctgaatatcccccataactcaggcagtgtgctggttcctggacacgcaatgttccctgttcatcaggagtaaacaatgcctctgaaatctctggatgttctacacaaacttgaatgagaaccatagatcaacaagagttagtgaaagacagaggatctatagttctggccaaggaagtatctagaaagaaatcactaacaaagaaaaatcttatttgatccaggaaagggagattgggcacagagctcaagcagtattcaaatgaaaggtccagaactaacattgattgagtacttaggtgtgctaggcattctactgtgttctttcctatctaacccttaccacctatgaggtggttactcattgcctcaatgtacagatgagaaaactagagtgaagtacatttgcacattttctgattgacagttagtgaactggcaaaggctcgattcagtctcatgtctgctaggcccattctcttttcacttcatcatggcccccggtgagaacaacggtgtcattgccccgtcagtgctgggcctaaggagagggcaagaaggggcttagttactggatgagaaattgtggtgaaaagaaaattactgaaggtctttgtgttccagcaaaggaaaagatttaaatactatggcagtgacaacaagaaaatgcactttaaaaagttaaactaggccgggcgcggtggctcacgcctgtaatccctgtactttgggaggccaaggcaggcggatcacctgaggtcaggagttcgagaccagcatgaacaacatggagaaaaccggtctctactaaaaatataaaattagccgggcatggtggtacatgcctgtaatcccagctactcaggaggctgaggaggagaattgcttgaacccgggaggcggaggtttccgtgagccaagattgcgccattgcactccagcctgagcaacaagattgacactttgtctcaaaaaagaaaaaaaaagttacgctagtttgtaacatatgcatcatttaagacagggtgcgtcctgagaaatgcgtcgttaagagatttcttcactgtggaaacattatagggggaactcacacaaacctagatggtagagcctactacacacctagactgtatagcacagcctatagcacctggctacaaacctgtacagcatgttgctgtactgagtatcataggcaactattattaacacgataatatttgtgtatctaaacatagaaaaggtaatgcattgcactacgacattataaccacttccacatcactagagaataggaattttcagcatcattataatcttgtgggaccaccgcccgtatatgtggtctgtcgttgacagaaacattctgactgtatatcccaaatcccagagatttccagtagagctggaaaacaagtcaaccaatgggggtgtggccaggagtcatccctcccaagtggtagagggaaaccagaaggaccatgggacaagctctaaaagagtataaataaactctttaaaaaaaaaaaaatcccaattagtgggaaagtaaatggctgatactagtagcaaaaccttaagtctttgaaattgacatactggaaatgagccattattaagattttaaatgaaaataataggatttagacataaaataggaagcaaaatacagtaaacagaaatcgtgtagccaaatatgcatcaaatatgcattcccttcagctacacttttttcctctgaaatacaagttttagaaaatcttagaagaggggtgggcgcaggacttaatgctgggaagcaacaactttggggctgaatttacttgaatggattacaaattgcattgttacacagctaaaaaaaactttatgtatgaaaaatgataatagccttacactgagtacaaataatacttaaaagcatgtgaagatgtgagcatctgtgatgttacttataaaaaaaaagtttaggtttttttccgtaagttattggggtacaggtggtattttttccataagtggtggggtttttttccataagtattggggcacaggtgggttacgtgagtaagttctttggtggtgatttgtgagattttggtgcacccatcagccaagcagtatacactgcatcctatttgtagtcttttatccctcacccgctcccttcccccgaagtcctcaaagtccattgtatcattcttatgcctttgcatcctcatagcttagctcccacatatcagtgacaatatatgatgtttggttttccattcctgagttacttcacttagaataatagtctccaatctcatccaggtcactacaagtgccattaattcatcctttttatggctgagtagtatttcatcatatatatgtaccacagtttctttttttttttttttgagatagagcttcactcttgtaacccaggctggagtgcagtggcaccatctcggctcactgcaacctccacctcccaggttcaagagattctcctgcctcagcttcccgagtagctgggattacaggtgccaccaccatgcccagctaatttttgtatttttagtaaagaaggtgtttcgccatgttggccaggctggtcttgaactcctgacctcaggtgatccacccgccttggcctcccaaagtgctgggattacaggtgtgagccactgtgcccagcccacagtgtctttatccactcactgatggatgggcatttgggttggttctgtgattttgcaattgtgaattgtgctgctacaaatgtgtgtgtgcaagtatctttttagcataatgacttcttttcctctgagtagatacccagtagtgggattgttggatcaaatgatagttctacttttagttctttaaggaatctccacactgttttccatagtggctgtactagtttacgttcccaccagccatgtagaagtgtcccctgatcaccacatccactccaacatctattgtttttttatttttttgattatggccattcttgcaggagcaaggtcgtatcgcattgtgatttcgatttgcatttccctgatcattagtgatgttgagcatttttttaaagtttatatatgtatcttttgaagtattgaaaggaaactagtactttatattctttatcatatcatgttttataattgttgaatatgttcctgtttatttttctctgtcctgttgtgtagccttaagaagtgtttcaaaaaaaaaaccaaacatatctgaatgtataaaataagagtaaatgccctacaagttatgatgccacattatacataaaactgtgtgcatatatttttaaacagcataaatacatctttgctctgagaaaaagttgaacatgcatccccgtgaaaaccacaagggagtcaggggatgatggtgttgatgaaacctgggctcttggaattctctcaaggagaaataaggggtctggaattcttcccaagaggaaaacccactgtgggtcagctgtggctccagcggccctgaggtcagctatgactcattctttactggggcaatccttagagggcctctccctgccaggccatccctcagaggcctctgggtgcaatctgcattttccatcttcaaagacccctttgttcctatcttccgcctcaacacatagcatcactataatccagagaattgaagcattaaaattcttccctttgatttgctaaataggaaccctctcttgaccctatcctctggcaggattttatcccattggctaaaatcatggttccttctgtctcagaacatatgacacttgttaattcttaagcatcacagctgaagctttgcatcctttgcgtcctgacacacctctccaaagcttgatatgtgtctctggcttgggctctgcatggtccattttgcataatgacatagacactgcctagtccttcgtacagcagagggctcttctgattttctttggtctcaaaggaacaggcagtaggtggaaggcatgaggcaggtgtctgggatgtactcagctgtgtaggtgggaaggagcccatccttgacattgcagatgatcagatgagcctcctcttcctcccttttttttttttttttgagacagagtctcgccctattacccaggctgcagtgcaatgcaatgcaatggcatgatctcggctcactacgacctccacctcccgggttcaaacgattctcctgcctcagcctccttagtagctgggattacaggcacccgccaccacacccagctaatttttgtatttttagtagagatggggtttcaccatgttggccagactggtcttgaactcctgacctcgtgatccacccacctcagcctcccaaagtgctgggattacaggcatgagccaccgtgcccggccctcttgctcctctttaaaaagagtttctggcccctgaaaataaacatatattccaagttgcatgaagggaggtatcagagatgaagagagaagacagaggtagtcctgcagccctccttccttcacaggggccacctcttctctcttgaggattaaaagattttgagctgtaatctctcttcaggcagaggggaaacactgggttcagaacagcatcacttggtgccacggtgcagacgcatctctgagtctgaccgttctgacgcatctctgagtgagacagaagcagaggcactgggcggtccacagggtgtgagtctaatctgcaaccacctgctccagctgcagaggaaaaattctgaagacacctaaggaaacaggagctgcccacacactgcatcctgatgtgaattacgccaggaaaacatctgcaaaccacgaccagcagtgtgtcctgataccactgtgcctgcaaggctctcagacatgctgggtgaaaacagagtctgaggaaggataacccaaaacacctttatcatttcaaaagtccacctcagaaggctttgaaaaaaaaaaaaaagtcaccgttttcttttctattaaataggattttaaaatctagttacttgggaaactttggtttgattttaagtatttttaaattattattctgctttattctttttttgtttttcttttctttttagatggagttttgctcttgttgcccaagctggagagcagtggtctgatcttggctcactgcaacctccgtctcctggattcaagagattctcctgcctccgcctcctgaatagctgggattacaggcgtacgccaccacgtccggctaattttttgtatttttagcagagatggagtttcaccatgttagccaggctggtctccgactcctgacctcaggtgatccacccacctcggcctcccaaagtgctgggattacaggagtgagccacagcgccctgcctagtttgctttattcttatcccaggtcttaaggtcatcagagactaaatactgaaaaagttatcttcatttcccctcccctttgttccctgatcctagagtttctttatctacatgctaaggcaggaaatttccccttatttacctcataccaagacctattacaaaatcctttaatgcagcatagtagaggtttaagacaatgaattttggatccagcctgcctgggttcagattctggttctatcatttattagctgtgtgaacttgggctggtgacttgacctctctgtgcctcaaattctgcttatgcacaatggagtgacaatagcacctagctaatggatttaagttttaaaaaaatccatacctgtaaatcacgtaaaatagtgtctagcacagagtacatggtaagcactaaataagtgttgtgttttttaatggattttactgttactggtgtgtttacatgcttacaccattcataattcaaaaatgcttattaaattacttattttttacttatttaagttagcaaagatcagaagtttagtcttactaaaaagcttttgcacagcaaaagaaacaacagagtgaaaatacaacctactgaatgggagaaagaattgtaaatcatatatctgataaagggttagcctccaaaatatataaggaagtcctacaactcaactgtaaaaaataattttttttaatttaaaaatgggctaaggatttctatagacatttctctaaagtagacgtacaaacggccatcaggtatatgaaaaaatgctcaaagtcactagccataagggaaatgcagatcaaagccatgagacatcacttcacaccactcaggatggctactatcaaaaaaaaaaaaagacaactagtattggtgaggatatagaggagctggaaccattgcacgctgttgggaaaatgcaaaatgacgcagccactatggaaaacagtatggagattcctcaaagaattaaaaatagaattaccatatgagccaacaatctcacttcagggtatttatccaaaagaattgaaattgggatctcaaagagatgttaacactcctgtggtcattgcagcaggagtcacaatagccagaatgtggaaactacctaaatgtccgttgacagataaatacaaaaagaaattggtatgtgcaaacactggaattccattcagcctttaaaaaggacgaaattctgcaatacgcaacgtgaataaacctcgaagacgttatgctaaataaaataagccaatcacagaaagacaaatactgcatgattctgcttatatgaggtatctaaaatagattcaaccctgaagacattatgctaaatgaaataagccgatcacagaaagacaaatactgcataattctgcttatacaaggtatttaaaataggcaaattcatagaatcaaagagtggaatggtggtttccagaggctgtgggaaaaggggaaatggaaagttactgttcaatgaacataaagttccagtcaagcaagatgtgtaaggcctagagatctactgtactgcattgtacccagagtccatagtaatttattgtacacctaaaattttattaagagggtagctctcatgttaggtgttctttctatgataaagtaaaataaaacaaaatagattaatgtcatgattgtagcaaaataaagaaaacatgcactttcatacactgttgaggggaagaataagttgtgcaacctctttacaaaatagttcagcagtatctgttaaaattacaaatgcttttttttttttttttttgagacggaatctcactatattgccaggctaggatgcagtggcatgatctcagctcactgcaacctccacctcccgggttcaagcaattctcctgcctcagcctcctgagtagctaggactacaagcacatgccaccatgcccagctaatttttgtgttttttgtagagacgaggtttcaccatgttggcctggatggtctcgatctcctgacctcatgatccacccgcctcggcctcccaaagtgctgggataacaggtgtgagccaccatgcccacatatacactatcgaccaataatttccgcctataggaatttaatcctatagacatacttacatagacagaagtataaggataaaaaatataagggtaccctatagaagtccttggggtgttaggccaggagccatctctgctgttttgtgcctccttcagcctatggatttcccctcaatgtcccctcaatccattcctctgtgtctctcaggggaccatttcctatgggtgttaagctgtggatgatcatggggcaaaggtgcagttagtagaaaggagaaaagcataatcatgggaacttgaagagtgaatgatttaggaattagggaaaataataaattctgaataagtcattgtagaactatttatttggcccacttcatgaattacgtgcagtaaaatagggaaatactgacaaccctgtttcattttcttcattaaaaatacaatagtattgtggctgggcctggtggctcacacttgtaatcccagcagtttgggaggctgaggcaggcagatcacctgtcaggtgttcaaaacaagcctggccaacatgtagcagtagtagtagtagcaaaaccccatctctactaaaatacaaaagttagctcagcatggtggcacatgcctgtagtcccagctactctggaggttgaggcaggagaattgctggaactcgggaagtggaggttacagtgagccgaggtagcgttgctgcactccaacctaagcaacagagaaatactccatctcaaaaaaaaaaaaatccagtagtattgaatactctgattttgaaaggtgattttatatttctcagctcaagagatgccttcaaggggaagctttctccagcttcactgagcattcaatcaattcctcttctctctactcacattgacccttagtttaccttgatgtaaccctcttcattctgttgttagtgttcttgaaagtcccttggaagcaggaattttgtcttactgcttttgtcttgttcatctctgtaattcccagtacatcacctgacataacaaagcactcaatcgataaaaacagaagtgactaaatgagctcagctctggagcaagtcatactcagtattatcctccacagtatcacgtgcatggtgattctcagtaactgtgtgctgagggaatgcctgcatgcgtacatgaatagacatagtataaagccaaaccatagcatgttgcaccaatgatacaaaatccctgacttctaaactccgtggtgctaaatcaagtcagaattaaggcaagacttgttttcatctaaaaatatatttatatgaaaagtcctacagagcattcaaaggtagatcacatttaactttgcatttaacccatgtccttttatgaaaagaagagaattatataaattggctgtctggctgccttaaagcccacagctgcctcatcccaccactcgtgcaggcaatctctggaaagagaagagcgagctcatttacttttacatcactgggaagagctcttctctgctaatgacatactctgccttcaagagccagtgtttaacccttctcagacactgatattgacccttgaaatgttcaacacagacaaagcacttagcaatagttgggtagcaacgagctcaggataaggtagctggttcaggaaactgacttttataactgtccttctataagtcttgtgctaaacaaacccacgtctgtctcctttccaaatcacactgtgtcggtgaccctgagaaacatgggcatccgaggctcacattgcaggatctccctttaaaaggcagctcagagccacttgaagaaacacagatgagatactcatgtgatgtgatacagtaagagttgatttgcagccagagctcaaatcaactgggtccaagggtctgggtctgggtccaagtcctggctcaaacacttgctgaatgcatatcttctgtcaagttatttaacctctgtgagcttcatcttttagaagcggttatgatgtctgccctacaagagtgctgtagtgcggcactctgttctcagagggaggagacggcctttaacaccaggcaggaggaaaccactgctatatacaactccatttgaaaatcatgcagttactttcaaatgtttattttaacaatcaaagagaaagaaagcaaaagcaggctccaggtgatgtagatgctgctgttcatagtaaggcaagaaatctttataccagaattgcggtcaaattcctcgttaaagtgtgagaggagcaaaaaaaataaaaataaatctaccaaggtacagtcaggaggctgaggctggcctgaagcaggagactcttccctaaaaagtagcatctccaaggagcacatcaacacaacaggtcccatgttcatttgcttatcttctcagaaaaagtcacccctgtagagggagttttctagctcagatcatgaaggagaaaaaaaaaagccagtttcctgaaagattcctgttcttgcttcataacatagcctagtcaattaccttcagacaaaatggcttggtagcatgaaagggtcttccagaaggacacaccttaccaccagacccacatttagcactgcaagctgaagcccccaaatgcaaccagacagttccttccctaggaaaaggaggctggcttgaaccatgcctttactctgacatcagcggtccatgtcacttctccatttccccagttgctttttctccgatgaagctacaagacgtgaggagtgaggctaaacttcaagctatttttccaatgaaaaatagctggtaatcgcattcagaaatcaggaccacaaatgggcctaatctgcattccccccaagtctccaaattgaagttctgcagggatcataatggcccttggaattactgagtgcctcacaagaccgaggtgtgttctcccatcactttaaccctggtgaacccaaaggggaaaatggaaacaagaccacccatgaaagtgggtcctctctccttggatggactcaatagaaaggagttctgcccctcaaagcaaagttttctcattgtttggcctaatgcaaatactcaaatacagtttgctctaggaagcaagttgttatgtgcaccattttgtttctgattaaatttagatgctagaggaaatttatttacctgcccataagaagaagcctgaggtcacgggtggcccttaaacttggccatgtgggtcagcccctgcactccttaaacattatacaatcagtactggctccgggtgaggtttccttgtgtgctttctccttttcagggtatttttatttctgttatcttagaatccatgacagatctgggatataagtatgaacaataacattatccctattttatctcaggaaaaaaaatgctgaggcttaggcatgtgaagtgatgattcaaaaaccccacaacaagtcagagataaagtcaggactagacgtgttcgttctttcaacagatatttattaagcatctattatgtaccaagcagtgggctaggctctggggatgcagcaatgaacaattgttaatcttgggtaagcattttgattgggaaaacaacagatacagaggcaagttcagctgttggaggtgctaatgagcaggacagagtgccagggttgtgagtcctttaggctggtggccaagcaggagctctcagaggaaggaacatttccgctgacctgaacatttataaggagggggaagagcaccccagagagaaggaagagcagggacaggtctccaggcatgtccaaggaacagaaaggccagtgtggctgaatcatggtaaggaaggtagagagtatgaagagaagaggtggaagcacatcatacttagcaaatctctacccattgaatcaataggtttcaatacttcaggagaaagtactagaaaaaaatgaagtcattgtttagattttagactgggagaattagacagggacaggggttatagccagacaagtctggagagtcagaatttatagagaaaaaagagagaaatttcttaatctgaaagttcctttcacatagcaagaagctatggaagccatatgtaagaggctgtgttgccacagaaaaggcaagcctggtcctttgtcaaagctagaaaccctgaagtagagaaaactcaggatttgatacaaggaaagtttccacttaatcagtttccaagatagggaggcaggaggataggagaagggaattagaaaagacagggtcaggtacaattctgattctatttccctctccctagggccataatccaggctgccaatgttagaaacaacccaagaaatgtgggaaatctcagacagtgaagtctgttcttcacttcctttgtcataaactataaaaatttcaagttaaagttggtgttcttgaagtgcaagtgcaattttaaatcatgccgtgttcctactccaaaatgcttttcaaccttatgcctctccaatccagatattctgagccaccatgggtggctgcaatccagccactgagggcatagagctcacctgggaaaaccaagagcaggaaaggaaggatttccatcaagattccactgtccctggtatctcatagcctttggacaggcctatacatacagaaagttagaagccagattttctaaaggtataacaagcatctctctttgggtatccctcgccttagccagcccctgtgggtccacaggaattcagaatcggcttccggtggtgctggctccacaggtgggcccacaggtggtgcaggggccacagcttgggcgaggagcacagggggcagtcacgcaggagggagacgtggagcacggattgcaggggagtctgcagagagacaaggtgagggaagtgagaggcaagaaatgaatggggtctcagtgccatgtgggggcatgaggaaggagtccccactgcaaaacaacagaacatggacccagctggaccctgtgaccattagcacctagtgagcacctccagggttagactagacaagtggtttctaaaatgccttccatgattaaagttatcctatagaataaaaattcctaggaagaatttaagaaaagaaaaccaagtccaaaaatctgctggatctatggacatatctcctgtttgagcagcgaccctgtgtctactctcatcagtccatggctaccccaagcagccccggtggagacctggtaaatatcctctaagtgcatggtcattcccttcattctgtcaaccacatggagtgtgcaggacagggcaacgactcactgaaaaggagtgcacagagagcctcattctacatagagacagcccttctgctgccctgaggacctcatcagaattgagtaaataatttggccaggaattgcccagatcacacgtacttgcagtcctcgctttccagaaggttccggtacgtggcaatctcattctccagccgggtcttcacgtccagcagcacctggtactcctggttttgccgctccaggtcggcccggatctcagacagctgctcctccacgttgctgatgaggctctgcatctgggccagctccgtgccgaagcggtcctcggcttcacacagggagttctgcagacagtccttctgtagtgggaaataaggggataaaatatacaaggccccaagggaaactgctacatgcctcaaattttgatggtgataacaggtgggagaaacttgggtagtgagacctccaaaataaaatgctactaggccatggcacggggcatttgcagtgcagtgagagtgaaggacacgtaccaaggtgtgctgggcttggcgctccacctccagggcattcaccgtgcatctcagctccaggatctccgactggcagcactgcagctcctcggagcaggacatgtcctgcaggctgatgccttcagactggagcacagagagacacggtcacctccctgcccagatggaggccaggtaccccctggttctataccccccccactcacctgggcttggaaccactgttccacatcctggcggttggtctccaacatggcctcatactgagcccgcatctcccccagcaccctgttcaggtcaatggtgggctcaatgtccagctcaatccggagcttctcccccagctgactcctcagaatctttacttcctgcagaagggaggaagggacagacagcctgcatgaggaaagggcctttgatggagcagacagcaccaggaccccgcccctggcaagcagtaggaggggagtcccacacacaagcaaatgggaaagtcttgcccagagggcattcgggagagcccacctgcacaccttcctcatgcccaaggcaagtctgcactttccacagaggccctctggaccctcagacccacctcagccctgcatcctgatgccagctgaggccaggcaatgctctgagagcccggggctggggagctcccctgtctgcccagtgccctccccaggagtttgagcgcccagggccacacctgctcgtggttgctcttgagggagagctgctcctccttcagggactcctgctgggcctccaggtcggccttggccagggtcgcatcatccaggagcttctgtgtcccacacttgtctgcctccaccagctggcgcagggagcgctcactctccagcctttcatcacaggaggtacagggtcaaaaagaatgcccccaagagcccctctcggctgccctggcttcctacctcccacaccaccttggatcctcatttattcactctgtttagccctctgtcctcaaaggtgaattagacccagcccctcttctcaaagagctcatggtctaatggagaaatcacaacactacattgcacaatatacatttttgccattgtattctgtggcaactgcagttcaggaagatcaactgacttgcgtaagatcatgcatcttgggacccagtccaacgctcatgccattgcaggggctgtcagttaccaaagataagcaataaccaggtgcctgatcgtgatctgcggctccttatcccttgctttcagctgtcttcccctctctcatttttgcctaggtaccttatacctggtaccttagggctccctaattaaatctggacaaagactcatctgtaagtgactcctctgacttatatatgaaacccaatggctgtcttgctcagttcatccttcaaatcacctcattttgctcctggttaatgaactcaggctgccttatcctccattttagggaaataaatgaaggaagacaaacatatatgcttggattaatgaggagttttcccttccatcttccatcagcttcgattgtaatgaaaattttactgtagagaatctagcaaggaagaaatgacaatgattccctcactcaacaagtatttgggcattgggatggagggtggggaaggagtcaccctggccctcctccgcctgacttacttgatcctaaagtcatcggcagccagcttggcattgtcaatttgtacaatcagcctggcattctcggccttgctgcacaggatctgaggagaacaggaagacagttcacacacaaagcatcatgccctaggctccttctccacgtgtggtgtctatgatcatgtccaagagaaaccaagaacccaaagttctctgagctttacatggattcctcctgtcttgcctctgccatctcagacccagcacacccaagcgatcccacacctcaccttctgttggagctcctcgatggtgtggaagtaagactggtagtcggggcacacggtggactcgtggcacttgctcctctcgaggagtgtggcctccagctccgcattctcctgctccagctggcgcaccttctccaggtagttggccaggcggtcattcaggaactgcatggtctccttctcatggccattcagggtgttttcaccataggccccacagattccaatgttgccaggaatgtggcaggtccctggcaagggacaagcagtgtggcaggtaggcggcagacagaggctggggcggcccaggggagtggaccccacacggactcggttggcatgtgccacgttggccaaaaggcacatgggggcaatgttggcctctgccccaggctggcacccaatgtcgatgggagagacagagacatttcttgctccaggagccatggtgcaacccagagggcatgaggagctgctgtaggaagaggtcatggtgttgggctgaggctgcacaggagcttcagatcagctgggaaagctgaaccactgagactgaagcctcctctcctcccagcccttttataccccatcctgggcgggtgttggctccaatgctttgacctcctgccttgattatctacctgttgtggtgccatcatcctgttactcagctgctgagtttaccatgaaaagtttctcagctcgttaaaggaatgttgacgaatctgaggcctcttggctctttgaaatcaggttggctgttgatgggaggtcagaagctttttattatctttcaaagaagcaaagttatagccatcagatgcttagaccttgactgggtttggcctctttatggatgtgtccactctggagacacaaactttcctgttggtcagtggtgtagcaggaggactaaccccggtgatgacaatggttctcacttgggttaagactcaaccagccttccctatccagggaagaaactgagtcttggaattggtggatgttatggccttgggttatcaagaagtcctacatttcttctttctttagttggttgcctttcagactcactttgaggagcaacaagacttagatgaatccagtcactcaaaacacatcccctggctacgtcccatatgctacgcaccttgctgatgcttgatatatagttggttaagcacaaaatagttcctgccattggggaacaactgtaacttgggtagacgtgatgtttcaaacaaggtatctgagaagctcatgaaaatgaggatgactccaaaaaccatggcttatctcgaccaagaagggcaagctcaagaagccagaaataaacaaagagaaatgagcaataatcttactgaacctcaaataagaacttggtcatgaaagtcaaaggacattgagtgatcagagcctctgtgggctctcttcataccttgcttcctttattctaaagtcagtcatgagccttcaccctatgagctaggggattgagcaatgataccttttaatctttacttccaacctgggaggtgggtactcttaattttacaaaataaataaacaagccattgaggacagttttctaagatcaacctcactataaagtataaagcctattctcaacatcagcttctttcaactccagaaactgtttcttcaccttgaccacctccaaatcctccaccccaaggataactactgtgtcattgctagaactaagaaggattcaaattcctagaaaccgggcaagaagttgaaattaagatgtaaaacaaaaatctgacattgtgtatttttccctttgtatctcagaaaatacagatgtggaggtattcatacaataaaacagagtttctccaagggctaaatcagaagatgccaggggaaagtcctgtccctaaaatggttatattacacattccacattcagatagttcttggtactagggatccaagacacatggctgctgagatcccaaaacttttctcccaaaatttgtgacagaagatacatagacccctgagactaagaaaaacctaatgtggaacaatccaaagtgattataactagaattttgggaaaatgagtttttgccagtcccctgagcattgaacaaaagctgaacatacacctctatagggatcagacgtgcatatgtgaaacacaggctattggagttctatcaagaagaaatacagaatctgagaattcagtccagattgggcttctcaggaaagtaagtagtagtgagcgctgacctaagggttattcagagctcaccaatccataaccctttacagacaacatcattgggagacatcaccagggcaggctgtcccatcctccagaggccactgggtgcaatctgcatatgttacatcttcaaacacccttttgttactctcctccgcctcatcacatagcaacaagcttctctataaatcagagagccaggcttttaaagtcatttcctttgatttgctaagtagcacccatcttttggctttatcctctgcccagattcattccatggactaaaagccacgatttcgtccattcacaatacatgactcatcactgctgaagccttgtgtgtccagatgacacccctctctgccaactggcttgggtcctggcttgggcttctaccttgtactgttttgcataatgatactgatgttgcatggctctttgtaaaatcgctttgttcccctgatttgtattttctcaaaggaggtgaaggagcgggtggggatcctaagactctcttccttcccaaccctttaaaaagagtccctgtggcccctggtgaccgaatatgaggccaggttcagtaacaagaagtgatgaatacagagtgtgagagatgggagcctgctgccctccttcattcacctgtgtgcacaacattctctgtgtggattctgactttagacatgccgatctctagaggcatgaagtctactgcaaatggaggtgaggagctgtggtcttggaatgccattttcactaattttgatacataggggcatatctcaaccaatgggagagaaaggtatggagctgtaggctagcacctggagattgtgcctaactcaaagtttatcttttctgtgtcatggctcctactgctggaagatgcagggaggcatctagggagttgtgccctgtgtgggaacgtcacccatcacacattgcagtgaatgcaaagatttatgacaagtactatatgtagagttagtgctgccacatctccagggtgttagaaaatggtgtcccaaacaatcctagatcaagaaaccatgaagactcttgagagaagaggctgagcatataaatgtattattctaggtatccaactcctgaggctttgatgaatggaaaaggtacacttctgttcaaattaaatatgattttatctatatatgaatgtatgctcatttgtgattaagaaatacaaactaaagagatattgttttcttatcaggttttgctaagttggataatagcacacagtgttggcatgagtgtgggaaacaagtcctatcctctcctgtggatgacagtcacgagcttccacctctgcacataggcacagaaaccggggcccgtgcgttgggacctgtgagcctcacacctgcctctgatggcatcatttgctgctccaggcttcactgcaatcgacccacttggagagtagctcaggaggctcaccctgccctggcaagcaatagtgagggaagagactccagaagatgaattagaaagagttggaaaatctttgagaagcaagaccctaagaagggaagaaaatatagaattctgtttcaaccagaataaaaacagatctttggcacaggtcaaagatcctcattgtggaaaatattgaactgctttctgttgctcattacaaacccatgattatgaaacatgctgagtctgaaacagctcagtggccgttctctgtcacagatagattgagctgtgtgggctcactcatgctctctgcaaagccttctctggcttcccaggtaggctgctctccctctgctgacacactcttctcaccctgggaaactgtggctgtatcagaggtggtagctccccaccatggacttgggatctccaggacatcagggagtttgtctcattgctttttcctctttcatctccatatccccagactctggcacagagcccggctacagagtaggttctgcatccatgtgtgtttaattatgtaagcaggtaatgagaaacacagtagcaccaagcaaagatatttgtatgctgaaacaatgaagtaaaatcatagattcttaagcaatgtggataaatacacaaccagagatatgccggcaaattagctctctggggggaaaacccctccagtttgtagtgtaagccaatttctgtggtgtaaatactcccacaatagccaacttcaagcaaacaatatgatgtcactgaatgtggagttggaaagagatgtgaaaaatcggctcttgtgagttataagagttagctccagcgtaccacttgatcccactttctaaaaccaaaatcctgacagtacatttcttacatagtaattttttttataaatcctacagagaaaccaaaggtagatcacatttgatgacacaggcaagagacctgcccctagagaagaggaaggcattatggccatggtgccacccacaactgcttcatcttctcaccagtcactgagatgctgtggttccccccagggccccacggtcccagctgcgaactcaggcagcctctggaaagggcagaaccagctagtttgattgcacatcactgggaacaacccttctctgctgatgcaggatgcttctctcaagtcaccttcaagtctttctcagatagtgacactgacaaaggaaaggtacaagcccaagtgaggcacttagcaagcattaggcagggataagccagcacagaggagatgacatttgataaagaaaactgtatagatttatgttggtttttatgttgtgttgagaaaaattactctctggacattttcctaagctggtcgtgtcagcctgtagggcagtggttctcagagtttggtttcttagccagtagcatcagcatctcgcaggaacttgttagaaatccacattctcagatgcccactccagacctactgaatgcagatacactgggtgcaggggagggggcagcaatctgtgtttttccttgtttgtttgtgtgtgtgttttgtttttgtttttttgaaacagggtctcactctatcacccgggctggagtgcagtggcacaatctcagctcactgtagcctcgacctcccaggcttaagcaatcttcccacctcagcctccccagtagaggggattacaggcacatgccaccacacccagctaatttttgtattttttgtaaagacagggttttgccatgttgcccaggctggtcgcgaatgcctgagctcaagtggtctgcccgcttcaacttccccaagtgctggaattacaggtgtgagccaccatgcccggccataatctgtgttttaacaagccatccaggtgattctaaggaatgctcaaacttgataaccatcgctctaagagaagggaatagtcccaaacacagtgattagaaacgtctgggacaaacatgcttcccctcacctcacatccctttggaaaccagttgagaacaacttctaattttgactatacaccagaatcccccagggggccatctcatccttacaaggagcacaccctgatcctctctcagggtgcactgtctattctgttatttacaaaaaaaaaaaaaaaaaaaaaaaaaggccaggcttggcagctcatgcccataatcccagcattttgagagtctaaggcgggtggatcaactgaggtcagcagttcgagaccagcctggccaacatggcaaagccctatctctactaaaaatacaaaaaaattagccaagcatggtggtgcatgcctataataccagttactcaggaggctaagacagaagaatggcttaaactgaggaggtagaggttgcagtgacccaagatagaaccactgcactcaagcctgggtgacagagccagaccctgtctcaaaaaaagaaaaaaatcccctggggagtttttagaacttctgatgcccaagccacacccagaccgatggccacagaatccctggaggtggagcccagcatcactattttgtaaagctctccagatggttccaaagagcagccatggttgagaagcaatgacttagaagaacaagaaaagaaaggataggaaaggtgatagagtcaaaagcagcactttggggtcagacagagtgcagattctggctttactatgttctttgaagccatggaggttttatttttccttgttggaaataaggattataaaacccaccctggcaattatttgggagaattcacattccagaaagcagtcatcagttactaataaaattacttttaataaagctgtacaaggttgcaagaccttatctgcaattttgaaatccaaaaaattctgaacaccaagttttctcatgactcattggtctttgtatagtgtttatctctctcatgctcatcaaaacccactaaaatgacttcagagaccattcataagtcatagccatagttttaaatacactacacaagtcaaaagatacgaagtagcagatatgtaggctgaacacgtttaaagatctaatgtacaagaggactctagttaataagagtattatattcaggatttttgctaaatgagtacattatagctgctcttgccatgggggtgggtgggggcaggaaatgggtaactatgtgagatgatgaatatgttgtttcactataataaccattttgctatatatatgtatcccataacatcatgctgtatagttttttatttttatctttactttttttagagagagagagagtctcgctctagactccaagctggagtgcagtggtgcaatctcagctcactgcaaactccacctcccgagttcaagtgattcttctgcctcagcctcccgagtaactgggattacagccatgcactaccacgcccagctaatttttgtattttcagtagagacggggtttcaccatgttgattaggctggtctagaactcctgacctcagatgatccacccgcctcagccttccaaagtgctgggattacaggcgtgagctaccacacccagcctcatgctgtctactctaaatatacacaataaaatttattttttttaaagcatcacacgggatattcactgtaacccactgaaataacctgaaaacagtagtcacactctcaataagcaacttcatttaattcatttcccaggaaccagaagatgcagcttcctaagcattaaagaaaggaagtggccccactgagcaaactccttgaaaatgaaaacacaagtcgaagttgtgagaagctgcagagtcacaaggtacccgcctcttctcgaaggtaagccatttacaaggtgggcctcagccgcaggtgagtctctttcccttgcctccgtctcatctgcaatgagaggagggttccaacccaccctgtgcgcagaatctgctgctgccctggcagcctctggtgggtatgtagggtgagctcaagaaagtgttgctatgtggggcttggggtgcaggtcatgtgagcactcttgcacgtgacctccaggtgtggtacatggattacatggcctcttgcagcagatgcacatggagacagttcatccacagacccagctttagtttatgtccctccccccttactaactctgacggggggcaaactaattattctccgagccccatatccttgtctgcaataacagcgtcagcaatgccaacctcacatagtaaggacagttgtgaaacaaacatcagtccctcatcgttctacctggagacactgcaacactgatactcataaatgaagacactacttgacatcacacatacttgcagcctttgttccccagaaggttccagtacatggtgatctcaccctccagttgggccctgatatccagctgctcctggtactcctggctctgccactctaggtcagcctaactcttggacagctgctcttctacactgctgatgaggctctgcagctgggccagctccatgccgtagtggtcctcagcttcacacagggagtgctacagacagtccttctgtaataccaaggaaagggagaagcaagctaaaattcgtggatctctgccctcagcctcttaagattgtgacaccccaagactgtgccaggtccaggagcaatctaactccctttggctgtctttagccagaagaaccaatgctgtgttacttgtcttcacagtagacctttaagatcagagccccctcacctgagttaatgttgattcactcaccatccacatctgcaagaaagtgcctccaaaggagatgaaaccaaggtttaagctgactccctggttggtatctaagtgaggcctgtactgaccccaaggaactgctcatgggcagtgggaaccaagctggggctcccatacatgcagagggactcaccagcgtgtgctgagcctgaagctccacctccagggtgttcaccgagcagctcagctccaggatctccaaatgacagcactgcagctcctagagcaggacatggcctgcaggctgatgccttcagactggagcacagagagacacaattacctccctgcccaggtggatgccgagtcctccctactctgcagcctcccttcatctgggcttggaaccactgctccacatcctggcagctggtctccaccacggcctcatactggccccacatctcctctgactgctcaggtccgcagtgggctcagtccccaactcaatccggagcttgtcctctgcactcctcagagtgcaggcttcctatgtacacaaaaagagcagactctgcattcattcagccctccaccaaatgtcttgcccacctgaagcacagcatggtgactgctcaggcacttcaccccaggggagcagcagagccaccccagcagcccccttgtcagcatctctctccatgtctgaaatgatctaataattatctctatttttactttatcacaaagagtgacacccatacagagttgcctctgtttcaatcattatctgggaaaaaaaaaaaaaacttttttgagatatggcagcacaaaagaaagaaaagagcatcggcctggcacagtggctgacccctgtaatcccagaactttggaaggccgaggcaggtggatcacctgaggtcaggagttcaagaccagcctggccaacataagtgaaaccctgtctctactaaaaatacaaaaaaattagctgggcatggtggcaggtgcctgtaatcccagctagttcagaaggctgaggcaagagaattgcccaggaggcggaggttgcagtgagccgagatggcgccattgcactgcagcctgggtgacaaaagcgaaactctgtcaaaaaaaagaaagagagagagagagagcaggaagggaagggaagggagagagaaagagagagagagaaataaagaaagaagaagagagaaagaaagaaagaaagaagaaaaaaagaagaaagaaagaaagaaagaaagaaagagagagagaaagaaaagaaagaaagaaagaaaggagggagggagaaagaaagaaagaaagaaagaaagaaagaaagaaagaaagaaagaaagaaagaaagaaagaaagaaaagaaaaaaggaaagaaaagcacatcaaagaaacatgaattctaatcctggctctaccaattgacagtgtgacttggggcagtcacttcctttctctgaacttccacgtcctcatctgtaaaatgacccctttgtgagtccaaaagtccctgatgtctaatccctctctgagtccttgaatctatcatttgaatcatttcccacagataggaagagacagggctctagaatattttctccacatcttttctgtatctattgctgtttcttctctctgagcctcagtttcctcatccctaaaatgagagagttggactgccgatccctgtatggtctttgccagccctgcttttacaagattttgggaccatgggtctttaatccagggcaggggaaaggtcagccaaaggggagaagactctgcctggaggggaacagcgcccaagtgcaaacccaaggaatggatctgtcgctcttcctggtcaaccccctgaaattggcctcagccatttcttagttgcttctacctgctcacggttatttttcgaacacagaaactcctcccttagggactcttactgcacctccagctctccctggcgcagacccacatcacccaggagcctgtgcaggctgtttatgttggtctccactcattggctgggcccagccaactctgacacttgtctaaacgtggcagataagcatccaagccagtggcctgtctttcagcatgcatgcctctccatttgctcttctcaggccagaggcacttgtacatctgctttgattggggggatgtttctatactaaataaaatatgaaaatacttattgatctttcactatccaccagatactttagtgcacaatgaaagacagcaatttgacagagcaggagcatcgccatcttagacaaacaccaccattttaagtttcccttgattaaaaaaaaagtagcctaaatccagccccaaaatgtcagtctaatagctaatgtcagcataaacagaaatattccaaccctacgataacccccctccaaccagaaacatgccaaccccaagatagcttcccctctaaccaaagacattccaaccccacaataaatttttcctcacgtagaaacattccaaacctatgataagctcccagcttcctaaacccttaaatatccttagtctgtaagagagaacactcctaactgaaatcagccagaagcctctctcaggtttattctccaaaataaacctgtctttgactgttgagccacttttcatgtttctttcttctttctttaactcttacacaattaatactacatgcttaggtagaatgtggtttgggtctcaatgccatcctatgccaggtgtacctttgagcaagtttctttctctgagcctcaacatcctcatctgtaaaatgagggtaacaattcttagctcacaaggttgttgtgaagatggaataaactacattcagcactttggtgtagtcttaaacattgtgaacactcactaatgccactgtgactgttgagacctaaccctgtccttcaggagctgacttaattcttgattagggctcaatcttaatcaaacacatcttaaattacccctaaaattctttgggactgaatctttttattaatacttcttaggttggtggaaacatttccttggagggattcttttcaaaggctgcccctcctttgcttcctccacagagacctgtacctgacacgaaagagatggacagagtaccagggagcagcagttcccagctcctgtcagactctctctgtcctaaagttgtcacagctattttcacattgtccacctggacagccaaccaagcattccctaccctcctgggtgagatctgagaatgagaaacaccatgcttcacaaggatgctctccatggaattctccccaggccctaaaatgaatgaaaaaaaatgtgatctgagccacatggggacgtttccatctttccttatggtggatttttaagcatcaagtatccaagggtttgctcccatctgtaacgaaactagctgcgctctgggatacagatggggtttcacttctcactctactgtgggctccattggtcaggtctgggcagcagtgagggggttgaagggatagccccttggactgaaacccagctctgcacagccaagacatgcttctggttcactcaccctccctttttctcctcatccacttcctcaaaggcaccaacacagtggttaagtggacctgtgtcacgcagcttggcagtttaccagctctgagactttaggcatagcttctaaccccctgaagcttaaaatcttcccatctgtaaaatggaaaacgtgattctatctgcttcatcaaatccttgtaaggattaaatgcaaccaagcatatatgtttagcaaagcttctgacatctagtgagctcttaataaaggtgctctattctttttagataaaatagaaataataatatccaccttagaggattgctgaaatggttcaaagaaaaaaggtatgtgaaaattcccagttcaggtttgacatttagtagaatcaaggatgatttcagaaatattataaccactgttggcagcaatctaaaaggagatgtggaaacggccacagagacagactgctacatcccagctgaatatcagcacttaatggaaaatactaaataaatgtgattaattttttaaaaatgaagttaggttgttcatcctttccaccatcttgtacagaacaggaactccaaaacaaatagaaagatgagaatgccacaagagacgttcagatatgcggctgtgggttattccatggaaggcaaaatccatcccagggggattagcttctagagaggattccaggaggtggggaatatcacctgggttttgaagcccaactagaatttggccatgcaaagatgagaaagaaagcactacacatgtgaacaaacattttgtgagtgacaacgcagtttgacagaagcatagggcaagtgacaaagcagtttgatagaagcacaggatgtttgcagaagattagaaagaggtaagctacaaaaaaaagtgaggctgagaacatggcagccttgaatgccaggctaaagagctgaggcttcattttgtaggcactgtctgctccccagcacccagcgatgcaatcactcattgctggtgctcaataactagtgagtgaatggtggcatgtccttaaataaggcaggatctggattgtgaagaaataaatccatatcccactcacagtcctctcattgcagacatcagcaatgatgcttgttgaatggaactggttgtagaaccaagtggttgggcccttgacatcacagtttatttctggcaccttcaatccatctttatgaacattcatggactgtcatccccccaggcaacccctccaattctcccatcaccaatcctcagccctctctttccatgccactgacaccagagctcaaggcctcatcttactttttgttggagctccttaatggtctcaaagtgtgagcagtaattggagcatatgtcagggcactgccgtttgctccactgctggctctcagcaccacccctgcttctcattctcctgctccaactgctgcaacttctgcaagcagttggccaggcactcacttaagaactgcatgatccctttcccactgctgctgaggatgtcttcactgaaccagccacaggtgcccatactggcagggatgttcctggtccctggcagaggacaggcagagtgactgctggcagggccaggctggactgactgtgagccacaggttctaaggagatggctactaggttggtgactctcttacaggtgggccccagtcttaatactgggatctacagacattgggtacagagtttctagagtggtttctggccacagcctgtctggagcaaggaggcttcaaatggctcttgccaaagcttgaggagcagggatttctgctttaactagaagccatggtcctagacagttgagttgcagattggtgacaagggccaggtgctcaggtgtgagtgtttcctcacccagagcttttattcacctgccataggagcagatgtgatacacaagctttcccccaatgaatcctcatttgttctgccatcagaacaacccatcagcagttattcagtcctcagaagtagctccccactttatgaaagaaagggctgactttggacttcttgttactgccttctgttgtgaaaagaaatgttaaatgttttctctttagagatgccccattgaaaagttagactttgttccttgagtgactatctggcctctctctaggaatggcattggctctaagatgaatcgtcctctccactgaccttcaatacccaaaaaagtaaaattctctgataagagcctcaggaatccctaaagagcaatagagcaaagactgctaagttattagaactaaagaaaacttccaagtactaattcaacctttcgtgcttcagagaccagagaaggacagtgagctccccagggatgccaagcaagtcagatacagagccaggactggtcccagggcccctagcacattctgtttcctctgcaccaagatggacaagctttttctgttaaaaagacagatgctaaatattttaggctttgcaagtcgtatactctctttgtactgcaactacttagctctgccattgtagcacaaagcagacatagacaacagggaaatgaatgggtgtggctatgctccaataaaacttgatttaccaaaacaagtagcagtggggtttgacctgtgagctgtagttgccatccctgcttcacacagcacagtgaatgaggcttaaaaattggaccccttaagcatgtgggagaccttcagtccgctctggagccagagggctgggcagagggagggcacctgggaatggatggtgaactccaggactggacgctgagcctcagacaccagggccttcactctaccagggcatttacaccaagactggaagttcatccaatgctcttagagcaaagcaaagctacccatatgttgttgttgctgctgctgctgctgctgttgttgtttctgaaacttgggcttcagaatggctccaaaatatgactcagctgccattgtaattggggaaagtcagaagagaagagaaatttgttgccaaagcatgttttctttactcaacattcatcaggcacctacaatatgccaggcatcatgacaggcatttttatatgtactatatcccaacaactctgtgaaaaaggtagaattactcccatttctaaaggggagaagactgagatgcatagagattaagagttctgccaaaatcacacagcacattagcagcagaactgggggtctagcccagtttttctgaagccaaaggcactgatcttctccattaatcctagatgctcattggtgactttgtttacatattatgattaagggacactgctatttaaatacaaatttgtcttgatcagttgggcaaaaagatagacatcaaatgatcttaggaactttctgtttagccgaattgatatcattgcattcaagtgttacattttatgaaatacaggccgggtgcagtggctcacgcctgtaatcccagcagtttggaaggccaaggtgggtgaatcacctgaggtcaagagttcgagaccagcctggccaacatggtgaaaccccatttctactaaaaatacaaaaattagccaggcatggtggcatgtgcctgtggtcctagctactcaggaggctgaggcacaagaatcacttgaacccaggaggcagaggttgcagtgagccaagatcatgccactgcactccagcctgggctacggggcgagactctctctccaaaagaaaaaaaaattatgaaatacaaaaagaatattgttttattattaatgattttcctggttataccctggaagaggcatattctttttttgatcactctctaaaaggtttcctaatatagtggtgaagaaagattcagtcagtgcaattcagagtccacacacagccccaactcccagatgccaaacccaactcctggatctttcgggaagctgtcgccctctggccagtcttccttgaatggcagttctgcccatgggccctcactctcacccccagaagagggtgctttgcactagggcagtgagcagcaggggtgaggcccaaactcttgaatagccttggggaaagtggtgtctttaaaaagcacacccttttcttttccaatcccgctcagagaggatccctgatacctgtgagggtttctccaaaacatcaaatatgacagaggttttatgacttgaccagggtcctgcctacatttccctataaactcttcccctataaagagttaattagatgcaaatgctttgatatgaggagagagttcctctgagaatctccatgagtggtacactgagtccagttcccaggagattccggtgctggtgggggataaatatctcccaaagtctatgcccacggcttcttcatccatcaaataagagacaggctaggcaggagggtagctcgtgacacctctggcttgaagtaccatccagacacagaagatgatgggcctcacttctagcagaggagggtactcctggccctgggctgtggggcttggtttcatataaaaagctttaacagtcatcttgggagtcagacaggtcttggcaagtgggagagacacacaggtgtgggaatggggaccgagttggactgaaacaatatgcactggggaaacggagactctggaagtccccagggggtccagggtccaggacttctggcccacaactcctgtgcaatcattcctgctgaggctctgggctgcagctcaaggtctttgctcttactgagcccagtgctcaaagaaagaggagatgctgagtctggtagttgctagcgatgctttttaagagaactatattcccaggaagaagtttcagcttctcagagaaaatgtctcccttctttgggaaatgaaagaaaaggagaggggaaatatgtattagcctgaaataataataaacctagggtgcttggagaaagcataaagtgcttggagagacctaagaggcttggcgtcaaaacccttggcttcaatttccacctgttggttgtgtctgtgagcacatctgtccacctccctgggtctgagatgactcttctgtaaaactgggaaagctgagccagatcatctggaaggctccttctagttctgacagtctaagacagctctgtccagtagaactttctgcagtgttggaaatagtccatgtctgtgttgtcttatttactaccacttagccacgtgtgacgagtgcaactcagtgcaattcagtatatgaaacattcatataccgaatgtttcagtatatgcagccacatgtcgttatgaactaccatattggacagaacaggtctaggattatagaaccaaagctttggtctgttctgtgtgttgtttatcaagctgagcacattccagaaaagttttgcaccggggttgaaattaaagattgctggtttgcacgcagttatgagaaaattcaattagccagaacccctctctcttggcatttcagctccttgaaattttacccatccatcaaccaggaaccacagcttgctaagcagtatgttcatgtccctgctgtcaggctaatgaccttgtctgccagggatgcctgcaggatcatgtctggagagcagcctgcaggcagcttcaggatccaatccatttttcatcatttcttggcaaggccagagggaggatacttaatagaaacatcatctcagctcattaaggaagaactgtgtgtttggagggtgaggttcagaaaggtgttcaagattcctgtccccagctctctcctctttacctgccatggccaatccattgccaagtcaggtccatcacagtgtctcttagattgattccttatttttccatggtccctgacattgtcttgcctgagaccctgttagcttcttccacagcctaacccctcctcttagctatcctgtctgtgttacttggtgatactttctaagatgccactcaagtcatgtcatctttgggctcaaatcctgcagcagccctcccattgccttcaggatagagtccagaatccaggctttttgtggggtacccaaggcccccctactctctgatgcctttctaccatttgagcttcatccccatcagcctctcacaggaactcactgctccagccagcaagaccccttgaggccttccaagcatgaccccctgctctcctgaagatccccacacacttacttgcctatctggtgccctgtagaccttctattcaacctccaagacctatttcaaacgccaccagctacaagaagcctttcagatcctctcagcttaagactttctccaaatcttgactagtgtttactctttctgggtaggaatttggcagttagaatggttaaaataacactgctgtgaagctagacttgggtttaagtctttgtccttgcatgtaaccttcaacaactaacttgaccactctatgcctccatttccatgtctaaaatggataccatgtgtaccttacaaggtggtcatgaaaactgcataagttaatttatgtaacatgctccacacagtactcggtgcattataagtgctcaagaattagtaacctttgccattattactattattactgttactattatatggcccttatgaagaaaggagtggcatcttatgcacatgggtcttagctcctcctgtaattacaagtgtttgaatggtggtgatcacttgcatttttaataccccctgcacccagctgtagtttgcaaatagtgaggactgtgaatgcgaatcggttgagcatctctagagcccaaaggcctcgatttcagtcctgggtctgccactaacaagctgtgtgactttgggcaagtttcttaacttctctgggcctcagtttcctcatttacaaaatggatgcaataatggcatatttttcacggattgttgcaaggattaaatgaagcattactaacaatgtgtctgggaactcttccttggattagccagcctctaatgcagaacctgcacccagtagctgctcagtgaagatattttgaaagaatgaatgatcacattgtaccagctgtaatgagatttaggggtgggtttattatgatatgattctcaattacagtaatttggcctaggtttctggcataattatctccctcctctctttattcttttattacttggctctagagtaattgattagttttaactggtttatggcatgcgggcccttttagtgaacacctctcaagcctctatggaagcagaaggagcataaaaataaatacagaatttgcccacgttcctcttaagcccaattgagtaggattggcttgtggatgcagcagcgtaagtgacaaacagagacagacatgtttgcaaggccactgagtacagctctatttgccagttaactaagaacacacgctctttgaggcagcacagacaaccagaaacatcaccaaagagaacagttcacccatggaaaaaagaggcagttttgaagtgatgagggcttaagtatcccctggagtatcagagcttgttgcaggtgatccacggtcctgctcagggtcttccttgctgaccggggctggccctgctcttctggtggccactgaataccaggctgcccagccccaggccctccaggatccactggcacaaagggacttcagtagcggccctgggggcagggtgagcaaggcatgccaacagtgcgtggcacacagacggtgcggggcacgcatggggagggcacacaggtggtgcaggaaggagtggagcatgggttacagggcagcctgcaggagaaagtcaaagagaaacaggattagtagagaaggcccactcggccacaggtcctgccaattctcccctcggatgcctctcaaccccatcttccgtgctttctctgcccagcctccctggtcccaacctccgccatctttgcctgagtcacctcatggcctcctaactgatctccccaaccccacttgggcccctcctaaccactgtccacttagtagccagagcaatcttctacagtcacaaatccaattatgtccctcccctccctaaaaccttcagtggcttccatttgagctcaggatgaaaagcagcttcctctggaagccatcattctcagcaaactaacacaggaacagaaaaccaaacactgcatgttctcactcataagtgagagttgaacaatgagaacacatggacacagggaggggaacatcatatactggggcctgtcgagaggtgaggggagcagggagggagaaaattaaaacaaatatctaatgcatgcagggcttaaaacctagatgacgggttgataggcaacaaaccaccaccatggcacatgtacacctatgtaacaaacctgcacgttctgcacatgtatcccagaagttaaagtaaaataaaataaaataaagaaaagcagcttccttaataggacctgcatgatcctgctcccacctcttgccccagcctcacctgatagctccattgctctgggagctgcaggtactctgaccttcttccagctcctgcagggactgtactgctcaggccacagggcttgtgccctgtgccgtacatctctggaaccctcttccctctccactcacctacatttcttctcttgtttaagagctcaactcaactctcacgtcctccttgaagcctcccccacctctctgagacaaagcccccatggtacatgtatctcctttcatcgtgagtagtaatcattctattatggtctgtctccccggccaagcagtgaggccagcagccacagacccatgcccaccctgcatacctcacatagaataggcacctaataagaatatttggatcagacaaaacaataaatgaatgaagaattaatacatggtgaaaggaaaaaggatgatctcagagactgacaggcatgcactcaaaaccaggaacaacacactggatgctggatggaaacccagtagctcagagaaccaatgggaggcctgaggatcatgtgcaacctgaaatgtgttccatttgcctggcactatatattttctttaattttttgaaaatacttaagaatcaggagaatttaacatttttaaaaacccagattctcagcttccctggaactattggaagatcagcaatattggacctgcttctcacacagtagaagtggccctgagggcatgccattgcctggattggacaaggcaagagctttctgcttttctaccatctccgtatgacccacgtcattcatgcatgttaatggcctggtccttgcaaatgtttgacacaacacttgccctgaagttatagattctgaatgatggagaagcaatgccaaatgcggaataagaaacagctacaacagtcgtcagcccactgggtgtccatggcccagaggtaccctgcattcagacagccaccaagtcctgctgattctacctgcacagtgtctagagctgatgcctctgctgccctaactcaggccctccctattgcttacctaggctgtggccagggcctcctggacagtttccctgcctggttcccctccctctactcagttcttcctgctgctatcagggccatcttcctgaagaacagctttgagcttgagagacatttactgagcatctactatgtgccacgtacagggaataaaattgtattataatgtctctgcattctagatgtttaccatctagtggagaagacacacagtaaattctctcatttcctcctcaaaacaatttccactcacctataaattaaagccctcccttcccagtatgacccgtgttgttctccataaatgggccccggctgatctttcctgtcctgctccccaccagggctcaattacacaaggctacctattgtcctgctgacatgccaaaatctccgttctgagaggaatggagctatgaggtgaggctggggtaagaggtgggagcaggattgtgtaggtactattaataaagctgcttttcatcctaagctctggacaggccatgacctccagtcacctgtctgcctatctccctaaacatatggaaatgacaggagggcaaatgccctgtcttcctctatcttggtgtcctccatagcacctgccccatggtgggcacttagaaggagcttgccagcttggaatgagatagaatggtctccgaggggcttggttcaggatggcagcatgaacaccactgcctgacttccttcagagcataccagcttcttaatggctccatagtcaggacagggttctaagctgatggtccctcaagggtagatccagttgcttcctataacctcccagaatccctgcccacgtctctctaagcctcagctgggcctgcgtacttgcagtcctcgttctccagcaggctccggtacgtgttgatctcgccctccagccgggcccggacgtccagcagcacctggtactcctggttctgccgctccaggtcagcccggatctcagccagctgggcctcaacgttggtgatcatgcactgcatctgggccagctgggagctgtagcgggcctcactctccgtcagcgtgttttccagggagtccctctaaggcaaaggaagacataaccatgaggaagggagctgtttaccatggcctgcttcagaaagaaccaagaagagccaaatctccctttgatgctggaaatgagccctccctacaccagtcactttggaaacggaagcccagaaaggtcaaatgacttgttcaagggtaaacagctggtacattatggaaccacagtttctgttcgtaaatctgatcctaaatccctcctttcttctgcaacctttgtctgccttcaggattggatctgagatttcccaagtacctccctgccggcatcatttagaacaggggttttcaaacctggctgcacattagcgccacatgggagccctcaaaaaatacccatggctggccggtcacagtagctcatgcctgtaatcccagcactctgggaggccaaggcaggtggatcacctgaggtcaggagttcgagaccagcctggccaacatggtgaaacccccactctactaaaaatacaaacattagcagggcatagtggtgcacacctgtaatcccagctacttgggaggctgaggcaggaaaatcacttgaacccagcgggggcagaggttgcagggagctgagatcatgccactgctctccagcctgggcaacagagtgagactccatctcaaaaaaaaaaaaatagctgtgatcaggtcccacctccagagactctggttcagttggtccagaaaagaacctgggcatcaggatgggtgatattgagatccataggtttggaagggcaggctaagcacagaacaagccttcttgtggagttgagtttgacagtgtccacctaacccatgtctgatttgaaacatcccttttttatctctgagctggatctcgggagaaacctccctccgggaaaagtcaacaggatgagcatccatggtggctgaaatctgagcctcctcttcctctttcctggggacctgcacctatgctcagtaccgcctaggatccggagggatgggtgcccacccagcagctctcaccaggctgtgctgggcctgcagctcgatctccagcgtgttgaccgtgcgtctcaggtcaatgatgtctgactggtagttctgaagctgctcagagcttgtggccacctgttggttaagctcctccatctgcagttgggggaaggagaaggctagagtcccttcctagggatatggaggaggccatccccaccgtgagaggcccacctgcatattgaaccattcctccacgtccctgcggttggcctccaccatggcctcgtactgacaccgcatctcctccagcaccctggtcaggtccaccgggggtgcagcgtccacctcgatgttaaggcggtccccaagctggcatcgaagggaaccgacttcctgaaaaggcacaagacctccagaaaaatgtgacaatgataggatcctggctcacctccccagggagacatgaaaagatgcaacaaaagttgctaaagattgaaacattagatggcccctaaggactgcagtccactcagcagcatcccagtgctcttcaaactccagctgaatacccctgcgatgggaacctcactgcaacacaacacttcctatcactttggcagaagccaagagcagcaccctggtttgtttgatgcatttgggctaaaatgggaaaccggtacccctagtattcccagtctccctccccacctgtgttcatcctgggaggagggtagcaggagcctggcttgactagttaaaggcccgagttagggcagctgcctcccaggcttggctgccaaagagggaaagttgtcactgagtctgccaggatgtgtgataacttctcattagtggcttcttggtgccgttcccagttctctgatttgagcaagatgagtcaggagcccgagggtgctcggtgagtacgtggtgactgattgttactttacacttaagcctgaggaaacccagccaagattcagaggcacttgttcattcaaatcccaagtcaagaggttgagagtcaaccagggaggggggaaaaacaccatggctcaggtgggcttggcagcacacaggtgcccaaagcagagggcttcccctccaagaaacttcaggagataaggaaaaatcagaaagtaaagggcttcagcttgagcattttatatgcaaacagaagggaggacaaaataaggataggggcaaaaagaggagaccactgcagctgtactccctctcagaagagatgggactgcttctgagagttgagccaggcagagatggacaggccattcaacgtgagatctggaacataactcaccccggcaccactgcaccactctacctctgctgtgtggctctcgagagaaaaaaatgcagttgccactagtgagtgcttggcagtcacactagcccaggaaatgcagaagggaagggggctacacttctgagagttgaccaagtggcaggtgtttcatacccatgccttggggatttccatgatccatatcctgtccattaaatcctcacaataaccctgcgtgatcatgttgtccccattttacagaagaggaggctcaggaagattccataaattgggcaaagtcactaaaacaacatgtggcaggcttgggaatttcaacccacgcctatccaaccccataccccacgttcctccccctctgcttcccggggccacttcagcgggacttccagcctcacctcctcatggttctttttgaggcacatcagctcctccttcagggactcaacctgggcctccaggtcagccttgcacagagtgagatcatccaggatcctgcgcaggccattgatgtcggcctccaccagctgccgcatggccagctctgcctcgtacctgcacaaggacagggtcagcaaccaagggtgaaacagaatgcagaactcagggaaggccttaaactgccggcactttccaaccctccgtgaaactaatggaaagttgccccagagcctatgaggacaggtcctccccagctccagccccccgactgaactcacttggccctgaagtcatcggcagccagtttggcattatcaatgttcacaaccatcctggcattctctgccttggtacacagaatctgtaggccaaggcacatggagagggttagttcaggatgagacgaagcaagaagaacccaaatgaagagaagacagcagcaaaggtaggatccagcagccctgcagccatccctgcagaaggtcctcttccctggaactctgggagatatttagcgaattgctagtccttggagaacttgagatgtattttttaagaacctgaagcttcgtaaattcaaattccccattttggatgtgccaagcaatgtggaagggaagaatctcatgtctgaagtcactcatgtgacagttagaagggtctttgacatttactgaaaacttaccgtggaccaggggctgttccaagcacttgacctgcatcatctcatcaaatccttttgacaaccccattagataacgaccattattatccctgttttacagatgagaaaactgaggcctggggaagggatgggacccccaaagtcatgcaatgaggcaatggtagaactgagactagatcccagatctctccacatgaaagcctcaggctgagtgctcaaattataaaataaccctatgccctagggaagtctctttgtcctgaacatagcttaataagctaacgagattccaatctggaatgccagctagtccagttcccttcccagagagcctattcacctcaccgctgccctcaccttctgctggagctcctcaatggtcctgaaatgagactggtagtcaggagtcatggtgagcacctgggagtgagaggcctcttggatcctgctctccagctccgcattctcctgctccagctgccgcaccctcgtcaggtagctggccaggcggtcgttaaggaactgcatggtttccttctcattgccattgaaggccccttcgctgtaccagctgccggggcccatggagccggagatgccactggctgcctggcaggaactggatagataggttttggagaggcagctggctggccggaaggtggtgggcaggcagaccgaaggcaggcatgccatgggctggcagacatagcccaggcacagctcaggccggcagttcacgccgctggaacagaccgaggcaggccgggggcagctcttgagagaggcttgcaagttgttggtgacacagcaggaggatgtcatgttggagaggccctttctcctcagccacagctacctggatgtctacagaccccatgccgcccgggccattttatgcccttgcagtgagggggctcatgatagaaattcatcattgggtggtgttgatgttcacacccagccccagaggaagctgctaattaatttgtaatttggtttccaataaaagaggccaaacttatcatttggctaaagcaggagtctgggttcctgtcattgatcaccatgagagagcttcaggacacatcttcaaagggtcagccgcatgcctgggccctcattactagggcaggccctccaggagactgccacaacccagcctgtgcctccactggctttgcccactgcacccccgcctgctctagccctgagaagcctgcaggtctgtgcagcagtggctgcctcttttaatgaaagcattccccatgggaagaggcctggctatttaacaaggaaatgtgtgggtggtagaaactgctccgatgctggcagcggcataaatccagcagaaaggaacaggaacctcagaggcttcctaacagacatcatcttcctgccaaggggaagaaaataatatcagtggggagagaatgaactcaagacataggcagcatcacttctcagccttttggctaagatcaagtgtggtatctgttcttatcgtcttaatatctgatacgtcctccatctgaggacaacatattaaatggattttgggagcagggagatggaataagagcttgctctgttcactctacatgttgacctggtattgcagtacctccaggaatgctgcaccccttcaaaaggcaaaaaaaaaaaaaaaaaaaagacccaaacagaagcctaagaatcaggtacatctttccagttggtctcttcctcttggaaaagtccatatcatgaacatctccaggtggcagctgctctgtcttgaccccctctggaccatccattcaattatcactgcaccatatacacaattgtcaagtgctcaataattgtttgttgaacagactgagaatagttggaacaggttctacttttactttctgttgtggcagatggggaaggctcacttcaggatctcagactatggaagcagtgtgaatccactcccttgggaaaggatgttctatagccctggaatgagctaagccaggagacagggagcatatttgcccaactatagaagccctgggcattcacttaagaaggcaacatgctagagcagtggttttcagtcctggctgcaaaagctgtgagcttcacatttagtatgtgtgtgctatatagccacttttttattcagtaatcttcttgatataattttggggtataagtacttgccttatgtttcacatattcccagaaatgtcagtacaagaacaggaaagggaaaatgccacccagctcattcattgcataagaaaaggagagcgtagatatactgcctctgacttgccatttggccttgggaaagtaattttgtctctccagacctcagtttcttcatgccaatcgagggggtcagatcaaatactctcacaatttgattctctgcaacaactacaaattccagtaccttgtctggattacctatttagagaagattatagcatcagatggaaggaggtgtgatggcaataccaactacaagggatgagactcatcaggccacccttcagaatcatagccagcacttgtggaatgtatacaaataccaggcatggtgctgagtgcttggcattaatttgcccatttaatcctctcacccaaaaactataattattataataaggtgttatcagtcactctcagcatcaacctgactcaggaacatgttagaaatgtgagttttcaccctagaagaaagtctaggcaataccattcaggacataggcatgggcaaagacttcatgactaaaacagcaaaagcaattgcaacaaaagccaaagttgacaaatgggatctaattcaactaaagagcttctgcacagcaaaagaaactgttatcagagtcagcaggcaacctatagaattggagaaaatttttgcaatctacccatctgacaaaggtctaatatccagaatctacaaggagcttaaacaaatttacaagaaaataacaaacaaccccatcaaaaagtgggcaaaggatatgaacaggcacttctcaaaagaagacatttatgtggccaagaaacatatgaaaaaaagctcatcatcactggtcattagagaaatgcaaatcaaaaccacaatgagataccatctcatgccagttagaatggtgatcattaacaagtctggtaacaacagatgctggcaaggctgtggagaaatgggaaagcttttacactgttggtgggagtgtaaattagttcaaccattgtggaagacagcatggtgattcctcaatgatctaaaaccagaaataccatttgacccagcaatcccattactgggtatatacccaaaggattataaatctttctactataaagacacatgcacaagtatgtttattgcagcactatttacaatagcaaagacttggaaccaacccaaatgcccatcaatgacagactggataaagaaaatgtggcacatatataccatgaaatactatgcagccataaaaaagaatgagttcgtgtcttttgcagggacatggatgaagctggaaaccatcattcttagcaaaccaacacaggaacagaaaaccgaacaccacatgttctcactcataagtgggagttgaacaatgagaacacatggacacagggaggggaacatcacacaccagggcctgtcgggggatggggggcaaggggagagagagcattagaacaaatacctaatgcatgcggggcttaaaacctagatgatgggttgataggtgcagcaaaccaccatggcacatgtatacctatgcaacaaacctgcacattctgcaaatgcatcccagaacttaaagtaaaatttttaaaaaaaagagtgtgatgttccccttcctgtgtccatgtgttctcatttgttgtggggtggggggacgggggagagatagcattgggagatatacctaatgctagatgacgagttagtgggtgcagcacaccagcatggcacatgtatacatatgtaactaacctgcacattgtgcacatgtaccctaaaacttaaagtataataacaataaagaaagaaagaaggcatagatgttgcagtttttaaatatttgctatttaatgttgttttatttaaacaatgtagatacactgctttgataaaaataaaaataaaatgtaaaaaaaaaagaaatgcagtttttcaggctcatcccagactggctgaatcagaaactctgaggctggggctgggatgcagcagcctgtgtttagcatgtccttcaggtggtttggagacccactgagatagaggaagatacaggcatacctcagagatagtgcatgttcagttctagaccaccacaataaagcaaatgtaaccataaagtgagtcacacaaactttttggtttttctgtgtatgtaaacattatatttacactatactatagtctattaagtgtaccatagcattatggcctaaaaacaatgtatataacttaattttaaaaatgctttattgctaaaaatgctaaggatcatctgagccttcagcaagttataatctttttgctggtggaaggtcttgcctcaatgttgatggctgaggactgatcagggtgatgattgctgcaagttagtgtggctgtggcaatttctgaaaatgagacatcagtgaagtttgccgcatcagttgactcttcctttcatgaaagatttccctgtagcatgtgatgctgtttgatagcattttaacagtagaaattctttcaaaactagggtcagtcctctcaaaccctgccactgccttattaactaaattgatgtagtattccaaatcctttgttgccatttcagtgatgttcacagcatcttcaccaggagtagtttccatctcaagaaaccactttctttgttcatgaataagaagcagttcctcatccgttcgttttgccataacatggcaacaattcagtcacatcttcaggctccaattctaattttaattctcttgctgtttccaacacatctatagttacttcctctgctgaagtcttaagcccctcaacatcatacatgagagttggaatcaacttcttccaaactcctgttaatgttgatattttgacctcctctcttgaatcacaaatattgacatatagaatagtgaatcctcttcagaaggttttcaatttactttgcccagatccatcagaggaatcactctgtatggcagctatagccttatgaaatatatttcttaggtaataagacttgaaagtcaaaattagtttttgatccatgggctgtggaatggatgttgtgttggcaaacacaaaaacattaatctccttggacagctccatcagggctcttgggtgatcagatgcattgtcaatgagcagaaatattttgaaagaaaccttttattctaagcagtaggtctcaacagtgggcttaaaatattcagtaaaccatgttataaacagatgcactgtcgtccaggctttgtcgttccgtttgtagtgcacaggcagaaaagatttagcatcattcttaagtgccctaggatattcagaatggtaaatgagcattgacttcccacttgaagtcatcagctgcattagctcctagcaagagagtcagcccatcctttgaaggttttgaaggcagactcctcctgtctagctatgaaagatgccgcctccctaaacttcatcatttctagctttttatttaaagggagaaacctgcaacttttcctttcacttgaactcttagaagccacggtagggttattaattggcctaatttcaatattgctgtgtctcagaaaataggtagacccaaaatagggagagagatgggggaatggccagttggtggagccatcagaacgcacgcaacgtttatcagttaggttccccatcttatctgggcatggtttggtgcatcccagaacaattacaacagtaatatcaaagattactgaccacagatcaccataacacatacaataatgaaaaagtttggccagccgcagtggctcacacctgtaatcccagcactttgggaggctgaggtgggcagatcacttgaggtcaagagttcgagaccagcctggccaacatgacgaaaccccatctctactgaaattacaaaaattagccaggcgtggtgtgcctgtaatcccagctacttgggaggctgaggcacgagaattgcttgaacccaggaggcagaggttgcagtgagccgagatcacgccactgcactccagcctgggcagacagccagattctgtctcaaaaaaaaagaaaaagaaaaaatttgtattgtgagaattaccaaaatgtgacacagagacacataagcacatgctgttggaaaaattagcaccaacagacttgctctaggcaggattggcacaaaactttaatttgtaaaaaaaaaaaaaaaaaaagaaagaaaaaagaaaaaaaaacgatatctgggaagtataataaattgaaactcaataaatcgaagtgtgcctgcatatattttaacagctgtcaccagaattcatcttgcaggaaaaaaaatgtctttacttgggaaactacattaagaagatcttgggttaaaaggtgggaccctaatgccttgatttggctggtaagacatcagagggtgaaaggagagaaggatttgaagttcacaggacaatcctggaaggaaggaatgaggaggagagagacaggaaccaggagcaggggctccaggatgatgctgagaggctgtcgctgtgaggtgcagtcccaaatgccagcgtgagcagagttttccgttgtgaaggaaagaccaggtttcatataaaagcagattgaggccaggtgcagtggctcacacctataatcccagcactttgggatgcccaggcgggcagatcacgaggtcaggagatcaagaccatcctggctaacacggtgaaaccccgtctctactaaaaatgcaaaaaaattagctgggcttggtggcgagcacctgtagtcccagctacttgggaggctgaggcaggagaatggcgtgaacccgggaggaagagcttgcagtgagccgagattgcgccagtgtactccagcctgggccacagagcgagactccgtctcaaaaaaaaaaaaagagcggattgataaaggtagtagcagcagcatccaaagtcacagaagaccacagttccaggcaatatgccagatctggggtatgtcgtgaagatggagaagtagggtctaggaaaggtagccacagagaaagtggggcactgtcagttctcaggcccaggtctggctgatccaaagactttccactgtaccccaacctctctggggccagagcaaactatcaggaaaataagtttaggaagagaagagaaagggatgcaaagaatccaggaggaagggcctgtttcaacaaaagcagataggatgtgtgtcacagcctgggccagcactgtctccctccattcattcccccgcagaaaaccagaggctccttctttggaaaaaaaataaaactccagagaaaagacttacagaaactgaactgaggtggttgtaccatgcaaaaagccggttttccaacctgcccatccacgtagcaccttctatcagctttttagtgtctcgtcataaaatataaacaaaaggatgaccagatacttgaaggaagcttccaatattaaagacaaagtaaaacaagcaaacaaacaaaacagtaaaaaaggaaattgaagaaaacagaaataatgcagaatccaaaactgtatatatatatattttttaaataacctcagagtgggagagatgtatatacatatagcagttatagccatgaaacaagaactaaatgttataaaacaggagcaaacagagaaaaaaaatgactttttggagaaaaaaatataacaaatttaaaatgcagttcaaaaatttgaagtcgaaagagagagaaatgccagaactgagaaagtcaaaagcataatagggaccagacctgggggtgctagggtctatgtcagagttgccctgagccctctgcactcccagctgtgttgccaaaagttcctctacctgacaaatgacctctcaaccctggctgcatgttcaaatcacccagagagctttcaaaaatcccagtaccgagtcatatcccagaccaactaaagcagaattttggggggtcagagcagtcatcggtattttttaaagccctccaggtcattccaatgtacaggcaaggttgagaacttgtagttgaatggaaacagcgttataattaaaaagcacaagcaaatgaagtaaataataattagaagtaggattacagatgatttagttagctacatcttggaggaagctaggatgggtttagaaaggatttgtgccacagagaatgccataaagaagggcgtgacctatacacagcagagttaaccgagcccaagtgctccagatagcatccacgtgctgctggccatgaggctccccgctgactttgctcagagttggaattagataatgaagcatgtaactgcatattcactttagctggcctggtttaccgggaaggaaacgtcagaagtgaaactctggccagggaaatgtggatgcccagcctcatagcaatccagtcgtccagctggaagggagagttggtggtgatgagccatcttcaaatgccctgcatatgctgggcaaagcattctcggcctcacttcacagcataagtgtcatgttctctatttaactgaagctcagaaatggacaatgacctgctaaacctcccacatgtagttagtggtgggtggggatttgaacccaggtccatctgactccacattcggagcccacgtttattgcactaatgtcaaggtccgcttcagccagtctactgacaccactgagatagaaaagaaaaaaagtggcaagtgagcatccttccagtcccatcccaaggcccccctcctacacagaccagtcctcccctggcagctaacacaccccctggcacagggacatgctttgtaagggcttgttgaatgaagtgaatgatcctgaggcgaccacccctttccggtgcctaagcctcaccaaaattagccaaggggttccaaaaagaccaacacggaggtgacgccagatgccaggagcaaggtggggctgggagcaaccaaaggcccaggccctctttgcagggggctagaaaggagaggattctgtgttcaaatcagagggaactatagcagatgtccttaagggacaagggtctctggcttgccttagtcagcatcttccagccacctgctctccctttggacgtggctacagctctcttaacatcactgaagctccttagcaggtgctctcagcatcttatgaggagcacatgccaactgggaacgcacatcctcgttttttgctcagaaactttggtcttggcccttctccctttcccactgggattaagggaacttgctatttgccttgcctgtttggggaggacattctggacacagatgagagcctttgggtcaagctgctgggagctctcacacccatctgaggagggctcgttgtacacctcaccagatgccaagagcacaggagcacatgcacaagcctcctaaggacaagagccttagcattcgggatagaagccctgaaggcgagcacactctccatctcctgcttatgatgggctgtggattgttaagggggttgctgaacttggagggctgcatgaaagggctgcaatggtagggggcttatgtaaatgcacccctaaaagtaccctgggagggagacaccctatcgccggtcttacaaggaccacagacaagaggctgataaagtggcctaaaaccctccctgttatgctgatctcagtttccatctcagttttgtccctcccactctgggatccccaggtgaccacgtatactaagagggattccacagcagtctgaaaacacctggcaccacactggaatcttggagaaaggtcttcatcagggaagccaagcaaaagctctcactgtaggcctctacccaccccaaacaggggcatagtgaccctgtcatccaaagggtcatacttggtcacacatctcccattcggctgcccaacagtcaccccctggacacagcagagacacaagccaacaacaccagaatggtgcaagttaggcatcaggggcctgagcaaatgcactttattgttctgccaacaaaagccctctactgcatttcagaatccaccggaacagcacctagaaggaaaacctgacccaggaggcagcctgagaacagagaccctggcacccattgaaatgatgaggagttgagacctttgggggcagccggcctttgtgacaggctctgagaaactttagggcatgtatttgcagaaagccttttcagccagaccctgggcctgggctctgcgcgaagagaggggattgggctacaagggttaagtttgggtagaggccaagttcaagccctggagacaatagccatggccatctgggtcacccgctctcagaaccgaccccctgggcagggcacacaaatggggcgggggctgcagtttgtgcgggctgcactaggaccgcaggaggccgcaggaagacagggaaggcatgacttggagggtgagtagtcaggtgcacatgggttacaggggagcctagaaaaaagaaaacaaattactgtgattttccagttgctgtttgcagtaactcaaagtagatcctagactatgcaaactgggaagcaccctaaaaaccaccttgatcctgcccccttgttttaccaaaagggaaacaggccctgagaggaaagggggcttgctggagtcacgtgatgagttttcaggaagaccagaactaagagaacagaactccagactccgaatgccaggctctttctaggcaccatgctgtcttcccagaacttggtagattgcagtgagaagacaagagcacatgcagtgatactcacttgctgtcctcactctccagcaggccccggtacgtgttgatctcacactccagccgggcccggacgtccagcagcacctggtactcctggttctgccgctccaggtcagcccggatctcggccagctgggcctccacgttggtgatcatgcactgcatctgggccagctgggagctatagcgggcctccgtctctgccagggtggattccaaagcatctctctgtgagggcaagagttgtgtagggaggaaaaaggctagaggtcagagaaggagcaaggaaggaatcttccttggagctatagcgggcctccgtctctgccagggtggattccaaagcatctctctgtgaggtcaagagttgtgtagggaggaaaaaggctagaggtcagagaaggagcaaggaaggaatctgggtctcagtgaggcctcagaatccaagaacagaagctcggagaatcagagtttgagctaggatgaaccacaatcagacatctcacttgagatgagctaattagcccctgtggcttctttgatctagaaagtatctccctgttagtgtcatctctgagtaactgatagttactcagaagatgtatctgcttgcacaaatataggacctactgcctggacatgtcagttgctacaggtctcttgtcctttaccactgggggatttgtgactggagctggtccctcattccctcttttctgcatagagaacccctggtgctcaagaacatggacccctggagtccgcctgtgtggtcaaagcatggaagctggggagcttgtgtgctcctcggcttggtccagaggcagctccaccctgccttggggctcaccatgctgtgctgagcctgcagctcaatctccagggcgttgaccgtgcgtctcagctcgatgatctctgcctggcaggactgcaactgctctgagctggacaccacctgctggttcagctcctcactctgaaacatacacacacagaacctggtcagccacaccagggacttggcttcagagagctacagaggccggttagaatcatgagccaagaaagacattcccgattccccagtcccactcatttattttatactggagggcattgttgctcagaggacagcaacctgcccaagtgggtctgttttgaccttgtcagcaaggtcaattgaagtgggtctgttttgaccttgtcagcaaggtcaaaacagagatgggactcaaagttagatttcttgattcagagccccagggtcacttccatgtgagccaccacatacccctgttgcactgactgtttccaggtacctacctgggtgtccaaccagtcttcagcatcccggcggttattctccaccagggtttcatactggcacctcatctcctccagaactcggttcaggtcaacaggtggggcagcgtccacctcaacattgaggcggtcaccaagttggcagcgcagtgagttcacttcctatagcacagaccaggatgagtactaattcccagagggctgcctccaaggttcacctcctcctcatgttcacctcctccccatgctcacccctcctaatgctcacctcctccccatgctcatctgctccccatgcccacctcctccccatgctcacctcctctgcatgctcacctgctctctatgctcacctgctccccatgctcacctcctcttccctatgcacacctgctccctcatgttcacctccccctatgctcacctcatccccaatgctcacctcctccccatgttcacctcctcccccatgctcacctgctgtgccgtgttcaccttttcccccatgctcacctcctcatggttcttcttcaggcagagcagctcctccttcagggactccacctgggcctccaggtcagacttgcacagggtcaggtcatccaggatcctgcgcaggccgttgatgtctgactccaccagctgccgcagggacacctccgtctcatacctgcaggcatagaacagggcacctgagtctgcatttcctttttgcatctaagtcaggcctgccctcagactgtccaggtgctgtgagtcctgcttttatgccccaatgacagagtacagccaaaaccctgagctcaggcatcacctgtgtccagttctagcagcccccaaccacatgacaagcaggacaactcacttggtcctgaagtcatctgcagccaatttggcattgtcaatctccaccaccagcctggcattctcagccttgctgcatagagtctggagatatgaagaagttatttcattgcaagaaaggacattccacttgttggagctccctaaagctgacaagggctgactctggaaggaggaagtcacccatcctagacctctgctactccatgtgcattggagtgttatgggcaggctctagggatcaactatggaaagtccagggtttcttccagtgcagtgtatctgtgacctgttactcaggttagatagctgcatgaaaatgcaacaggaaaggcctggcatgatgaaatgaggcttcttccaatctccctgtctcccaggcctactgggggcccagggcatttcattgccaacaacataccccgggattctctggtcataaatggtccctcacaggagccagctataactttgggccaggcgagaagtggatatgggcccttggcaagaaagaaacttctctgacaggcattttcttccctgagttacttatgggaagcctgaactgcactgcactaaatacatcaaacccaatcccctgactttaaataaaagaggaaatgaaaactcagaagactcagaggattgggcaataccaccaaaggtcacagagttcattcatagacctgatgttcaagctctggctccagtaactgccatctgggtcgcttacccagcctgaatctcagtgttctcaactgtataatgggctaatgatacctccctcttaaggttattgggaggagcaaatgaggccacagagatgaacatgcttggtgacttccaacatgccctatgggaacagaactaccaatgaatgctggtgacacaaagttcctgggaatccaaagccactctgaacctcttaccttcttctggagctcctcgatggtccggaagtaggactggtagtcagggcacatgtaggggacctgctgctcacaccactcacggatgcggctctccaggctggcgttctcctgctccagctgacgcaccttctccaggtagccggccaggcggtcgttcagggattgcatggtctccttctcattgccagtgaggatgccctccccaaaccagcccccacccccactgtagctggtagcgaagcctccagcagggaggcagagagcagggaggcagctggtggccctgtagctgcttctgcccagacccactgagcaggcagagaaacttctggccacaggggagagacttggaagcttgcaagagctgctggagtacattgcggacacacgagtggagcccccactggcccctcctgggctcttgagagacccagaagagaagccggccttgaggcatttggaagccatggcccctgcaactcagatgcaattgataggtctctgaggccagacaccccaaagcagagaagcagctccttaccccagatttatatctctgccccagtgggcattggttggcctttacaaagtgttttctcctcattaaagttaacaccactttctattaaaacccctcattaacctgttatttagtttcctgtgaaaatttaccagtctcataaaataggagccccattactatgtcaagactcatctccaccaccccacatcactgggaagaccaagtccctgtcagttcttcaaagggacctgtcatttgagcccagacctcagcctccgcattaagcaagcatgggagttcagccactgtcttgactttctccaactttgacttcttttattggcctgagggagtagaggaggtctctggggtgctcccagaagatggaagggtaaacttggttggtgcaggaaggcaggggtcttgcagccagggagacacagaaggctcttgaattggcccagaaaatatggctaaggtgaccaattttcttggtttccccaggaattttctggctttagttccgaaagttccatatgccagggaaacctcagtcctcggtaaaatgggacagcttatcaccctagatactgcagagccctgatggacacttccctactctttcccttgccaggaagtctgtgcaggttgtagagcctaagttctagccacaatgcctagagatcagttaattggacacctgcccatgatgacatctaggagggcatgtcttccccagccctggttgagaaatggagaagcccttccttctggctgcctgaattggagctcttttcacacagccctatcaataacccggctgatggtagcaaccatcattcactgagcatttagtacccaccagcccccacgctgatctgtctctatgcattctcttattcagtcctcacacaaactcatgagattggcatcaccaatagcccattaaatagaggaggcttggactgtttcaggagcctgtcccagatcacagctgaaaaagcatctgtacaactgttcaaggcatgctatcttctttaaggcctcacacacaccctccaacacagtcgtggatagaaaggtgctgactcctacagaaggagacaatggtcagagtagaaaatggcttacccaaggtccacacaggcttcccagggaggctaaagcccaggccttgcagctccaaaccacaggcccaccccactgcctctaagggcccagtcctggccaggccttcccccgaagtctggcccctgctccagccctgctgtgccctcccagctctgaatgcccaaggcagtgactattggtagatttcttggcctccaattaactgacgtcttctgattgtcttgtgtttcagccctattttcccagggagactgtaagcatgggggcaaggattgaccttgtactttttttttaaatctctgtagtgttaagcacagtgcagggcttctagatgtctatgaattaattaattaattaagtgatttttcccacggtgaattgtgttaagaaaggaaagaaagaatgggaggaaacaaaagagagtagggagcggggaaaggaaaacacagtcaatcttaactattcctacttcttttttttttttttttgagatggagtctcactctgttgcccaggctggagtgcagtggtgcgatctcagctcactgcaagccccacctccagcgttcacgccattctcctgcctcagcctcctgagtagctgggactataggtgcccgccaccacacccagctaatttttctttttttttttttttttgtatttttagtagagacggggtttcaccgtgttagccaggatggtctcgatctcctgacctcgtgatctgcctgcctcagcctcccaaagtgctgggattacaggcatgagccaccacacccagcctactattcctacttttgtaaatgaggaaactgagactcagagatggaaggggatccggcatctctgtgtaggtgagcagcacctgtccagactaaccagcccctttggccaagaacaaagtgttttctgggccaaaagccattctgcccaagggagatggatctcataaaccaatttagtgctaaagttgtgactaaaaaattcttgataagatttttagataactttataaaacatatatgtaatatttttcaagctgttttaaggtattttgtaaattggtctgatctatttctgttcctttttagcatgcttttcttaaatgacatgattatctagaaccccttatcagcaagaactaacattgtttagcacattcctagtaactttccttacaggatccttgcactctgctcagatgtggtccaggctgtccccagatcatgccacggatacactaaatacggccctaaaatgccctttgccctccttcctcctttttctgcccatcaaatccaaatctgccccaaagcctttcctggtcaccccagccctcagtgatttctcctcttccccaaaacttgaaaccctgcccacacccgctcctgctatcccagtgcagttgctgggagcgagggggcgaggtgtctccacagctggacgtgagctcctcgggaattgtgcctgttatccactctttgttccagccgcttccgccacccctgctccttcctagataggcctgagccttaagattggattagctgtgtatgccatgttccgttgttatctctttgttgattaattgatgtgtatatgtgaatgagaaaggcagtcagatagcatatctggaaagtacaaaaaggatcagaaaaaccataccgccttgaaataaaacatcatattcactctgcggaaatgttattgaatgttttctatatctctctccatatcaatgaaataggagcccaaagacctaagaaggctcctaagtcagccgcctgctgtgtgactttagaccagtcgccacctacccccacaacactgttgaattctggtttgcttgttggtcagtgatttcaattgcaactcagttaagggtgtgtgtgaggttgagataggaggtgtttcctaactgatacatatgctctggacaatgtaattaaaagctaggcaagtatgaataaataaagagctcacagccacacagggctgattgcgtgcatcagatgaggctatgagtgtgccctgtaaactggagagtgatcataaaaagggaaagcactgtacaacacaaggtgctgatgatgtgattacttatcaggtcatgccctgtgtggttcatccacagtgacaaggcagctcagctgtttcccggagactcgttccattcctggacccctgcctgtttccgcacagaggtacaatgctctctgtgcacgcctggtcacacactggcctcaggccagggtcaggggtgcagacttaggccctagagcatgagtggagcagtgagagggaaggggcagggcaggtgagagaaccatgccaactgccccccctgcccaaagctaggtgcatcctctgaggctgaggcctttgggttcactctccagctccaaggacactgctggcagcacagccctcaccatagcatcctgccagatacaaagcaaagcacttggcccatgcagtgggggttcctgttcaacactctgaagccagggactctgcatttgtagtaagagcaacactgatagctaccactttttggaagctacacacacactgtctcatcagaacctcctggcagccccatttcacagatgaacctgctgagaccagagaggtctcatgacataaccgggcatatagcacagagtggcagagtcgggctcagtgcaggatgctctgatgctacctatgcacgtcttctcctgttgtctgataagtttgctgcacctctggcttgctcagcaagtgattgaagagtcccatttagcagcaagtagctgatgacatgaggcagagccaggtcatggatgtcttggccatgacccagaggagagcccagaggagagtgagcacaagagagggggaggagggaagagagacagagacagagagcgagacagagagagagagagagagaaattgtactgagaagagctccagagccagggtcagaatagccaggtgatggccaggtctctgccactcactgctctgtggcctggaacaagtcactgccctctctgggcctgttttctcaagtgaagactggagcaggggcaaaggaaccaaccgtgaggccctcagacctctcccaggccatgcttctctgatcagaggggtgtccagagctggcagagttaggccccacctgcagacctgcctaactcagccagtggaatccagggctctgaactctgctccacagtgaagcctggctgtcctctccccagactccatgtctgagcacccacccccaccccactgtccctggcacccttcagtttggccctatgtgccttgttgggacatggattcacctgccctccaccttcacctccctgctctccctgactgccctccctggcatggctggctgaggatggctgcctagtgtttggccctctctgcttgttcctgggaccccctctccttaaccatccccagtatcaggcagcagggtgacagcagctgggcaagagaggagaagctgaaagaaaaagagagatagccaccgaatccaggtcgggctatggatgaagactggctctggagcctttgcctcttctggggccgccctaaggtgtctactcacaggcagggccaagctgagagctatggccgcacccatccagactgggtcagtgtctgttctcattggccagcctctgaggcatctttgttattaaatacttcaaatcaccctgccaccgcctcccactcagagcccgagaagatagacctaaatggaaaccccacaactatactgcagcccctgatcagacacccccatgaaccacacgagcacatgagcatcaacagagtcagccagggttgagtttgctatgccaggagaacacactttattgggtaaatttccaggaaacctggttttgcatggcgtaaaagcacagttaagtccggaaacacaatacggggagtgttttggtagaaaaacctgctaagcgtagggggacccctctagagaagggcagggtcgttaagcctccaggagccacaggggtgtcctccttcctgtggtcagggccctgccctggtggaccaagtgggctgtcacagcgggcgggactgcacgtgctccctggaggagatgactttcccatctctgatctcctcggtgatggtgcggatctgagtgccaacctggggagccggggtgcagggcacagaggggacacagggcaccggggggacagaaggaactctaataacaggcttgcatgccgtggcacaaggttggggaggaagcctgaggaaacaaaatcatgcagggtgcatttggcatcggagcactgggctgagattcgtgttaaacagatctagaggatcaagcgagaccggtggccccggatcatctcagtgcctctgaattccccaagggtgagaggactgagctacaggaatgaagagcagaaactgccaatcagaaaagatggcggaaaacacgcggcgtgtgttgggttggattctcccgctgtgcattaccaaagcctgggactaaatggagaatctcaaggggctttggtttagttcccttcatctgggcgacaaccacttctgggcttgacgccctccacatggcactgagggttcagtcaagccctaccccagcccaagggccactcacttgcagtcctctccctccagcaggtggcggtaggtagcgatctcgccctccagccgggccttgacgtccagtaacacctggtactcctggttctgccgctccaggtcgcagcggatctcagacagctgggcctccacgttgctgatcaggcactgcatctgggccagctgggagctgtagcgggcctcggtttcggccagggtggattccaaggaattccgctgcaatgggaaagaggaagagctgcctattggggaggaatcccctgaccccagaaacccacagccctgggcatctgcctacggcctgtgatcacaccccatgagagcctgcacgctgaggctggtgcgtcggggacctgccacaggccgtggccagcgacgcaggcaggggccactcaccatgctgtgctgagcctgcagctcaatctctagcgcgttgaccgtacgtctcagctcgatgatctccgtctggcagcactgcagctgctccgagctggacaccacctgctggttcagctcctcagtctgaaacacatgccagggcccagagcatggtcaaaccaagctacttccaagggtaaccccagcccaggagcctgtggtcccagggcaccccagccccacctgggtgttgaaccaggcctccacatctctgcggttattctccaccagggcctcgtactggcatctcatatcctccaggatcttgttgagatccactgggggagcagcgtccacctccacattcagtcggtccccaagttggcaacggagtacactgacttcctgcagagaggaggcaagacggcatgaggttgtgaaaaagatgctggattgcaggtttcaatgacctgaattcaaaccctcttccctcagtcaccagctgcatagcattagacaggatacttaaatatctctgagccttggtctccttctccgtatatacctacctccttctatgggatatttgtgagatgatacaaaccctaggcaaattaaattgctgttatcaggcactagagcccaaatagacatgtagtgttatgggcaaaagtgtagaccctctatgaccttaggcaagcaacttaacctctttgtgcctaagttttctcatctgtaaaatggagcttgtaacagtttataattcttgggattattgtaaggatgaaatgaaacgagaatgaaatgcaaggcctttgtatagttcctgccgcacagaaaactgaaagcccagcagtggcttcctaagctggatgggaaacactgggaagtcacatggcaccagcctcacctcctcgtgattcttcttgaggcacatcagctcctccttcagggactccacctgagcctccaggtcagccttgcacagggtcagctcatccaggatcctacgcaggccgttgatgtcggcctccactagctgccgcagagacagctctgtctcatacctgcacacacagaaccctgccaagtctgcagcaaaggaaaccacacaccagcagggacccctgccctactgtccagctgcagtggctgacgggatcaggagcatgacactcctttcccctgaggtccagggctcatgccacattttcccatccagccttattcccacatcaccagctcccaaaggcaggggacagaggcaagggagtggcatggcaaaccttccctgatcaggcccactcacttggtccggaagtcgtcagcagccagcttggcattatcaatctgcaggaccagcctggcattctcagacttagtcagcaggatctggggaacaagaggcttcccataagctacaggaggcccagcagtgtgggggcaggtagggggatagctcagctcacagaggccatgccactgtgtaccaccagccccttcaccatttccagccctgagccacaccccaggtgtggggggagcatccaccccacaggggcatcccgaggatgtcagtgaccatcagtcctggcgcctgtagccttcagagtggcacagcaagatacaccagggtgaggcagacctgagttcaggttctgcatctaacactgagcctgtgtgctcttgagcaagttgctgaacccctcaaaattcaacttccacatctgtcagatgggtccagtaataccaatctctccaagatgaagaataaataagccagggaataggaaagtgtcaggcacagtgctgtatccggtaggggcttggtacatgttccttcccttcctacagcaaggggaggggggtgaggaacggctggcaacaaggtacaagcaagagaccagcagagaagcctgggtcccccaggaaaccaaagccctagagagaaaagtttgccctaccaggagaattccctaaaagctaccgtcccatctggaaaggccctggaatgagacagacgcctcctaagagttgggctgctcagctggaaaggggccaggtctccctcaccttctgctggaaatcttcgatggtcttgaagtaggactggtagtctgggcagatgtatgggatctgaaactcgtaccactcctggatgcggctctccagctccgcgttctcccgctccagctgacgcaccttctccaggtagttggccaggcggtcgttcaggaactgcatagtctccttctcgctgccgttgaaggagccctcgcagaaccagcccccgctccccacaaagccagaggtgtggcactcagaagacaggtaggagccaggcaagcagctcccaaggccagagaggcccgacctagcagaagagatgtaccctgcagcaccggcgagactggggaccctgcaggagcccacagaacggatggaggacacccgagagatgccgcctgctgtgccacagaggcccttgatagacccagtggagaaggtaggggtgcaggtctgggtggccatggtgctagcagaggaaggttgcagcttagcaaggagctcaggttctggactctcaaggcctctatggagcatttatgtacactcaccattgggtgttggcatggtacacatctcttgctcttgggaaagcctgttcctaccccagatagctaatattagaatgtgatttttgctacccatccggaaccccatgccttgtaaaaaaaaaaaaaaaatcaaatcgttgaatttggtttgctaagtcaggactctccactgttgtcatttcctagcagaatatgagttttattgcctcttcaaagagtctctgcaccagatcccataaatcgggagtggctgcacgaatgacatttggttcctgctttctccacctcccttcccctggggatcctcatctgtcccttgtcacttccatccactgctgccacgcctcatagctgctcacccctgcctgggctactgggatggtaaaagggagcaaaggaactaaaattcagggagcacctgtgatgtaccaggctcattgttatttcatttacacctcgtaacaaccctaggaggtggctgattttatcttcatttttaccagtgtggaaactggggctccgaatggtttaatagcttgctcagtgtgaacaggaagtgactggcagagcttgggtctgaaactagggctctcagacaccaaatcctacttccttgccccactgcttccccacacaactggagtcaagtctgggtacccagaatttagggacaggagacatagttcaaatcctggctctgctactaatttgccctgtgatactgagcacatcatttcctccctgggaacctcagtgttttcactggaacagtagagattgtccttctgtcccgcctgcttcacacagatataaggaggatcgaacaagaagtgaaagtgttttgcaagccactgggtcctgcagaagtgttggttggttaggttaggttaggttaggttaggttaggttaggttaggttaggttaggttgacagtctttgatgatggtttatggctgtgaccagcaaaggttcgtgagtgtgagcattcacatggcactgctgagaatggtctgtctgcccactgggcacagcagggtggcagtgggagaaggagatgccccatagccagtccctcagtcaatgaacacatcatcacagactcctgctattatggaatctgcatgcttggatcactgggcagagctggagggcagtttcctttgtggccgtcagctttttgaacctcatgggtagaatcaggaccctagaacaacctgctctgaccctcctggtcccttaacaggtcacagaaatggccaatggcagactctttggacagaggaggaatacaaagaaaaaagctaaatactgccagatagttaagcaagccgagagagaagaacctgagaattggggaccaaagataaacctgggtcttccgccttgaaacatggactttcccaaggcttgggaaacctgctcactctgcccccacacacgcttggtttgcaaagctggcgtttatggaagcatttatgtgcttctaaggttgtaatttgccaacctcttaaaatgttttataagcttctctctgaaattatccagggaggattggctgtggtgaacatgcctctcccagcaaggtggacaccttgacaagatgtccaggagcagctggcagtggaccccgtgcagcccctctgggagcaagagcacagcatcagccctccagagcaccagctgccccagcaatggcttcctcacagccacccaatctccccagttctcctggcagggcctaggattggattgtcatggggtttcccaacctcagcccttcgtgccaggtcattctttgttgtttagggctctcctgtgctttgtaaaatgtgtggcagtatccctggactctaccaccagatgccagtagccaccccctgccccagtgttgacaaccaaaactgtctacagacattgccaaatgttccccgggttaggagtcagggggcaaaaccacccccagttgagaaccattggactatcaggaccaagactggggctccgacccaacctcccctaagcacccctgactttattttctgggacaactagcgtggagtctggctgtctctgttgggcccactcaggcaagtcctcaatacacccatgcctcggtttcccttgttcatgacacagcgtgcttgtcctgcaaaatgggccatagggcagccctcaccaagccctttgcagagctcttctctgttcgggatctctggctggtaggcatctgaagttaatattctcattttcttttttgttttaacccctgtactgtatgatccatatctgaagctgattctaggtttctctcaggacaactgaataagcaaggagtctgctaatccgaatatctagatgtccccatcattctcacctgagcatcaggagggacactgtggaccagagaggtgcctctagggttgtggggagaggaatgtaccttccctggagcaggtgaccagctcgtcaaaggtaaaagtctttcagctgccctcagtgtcttgcctttttccttattgttgactgcacagccaaccccccgacccaagggaagggccctgagccgggactcagcgagaactaagttcaagctgctccatccctctgagcctcagctttcacaataggtctgtggaggtcataacaccacaatcacgggattgtgagaactacatccaaaggggctggataaacaggaagtcgtttcacagatttaagagactgaaactgctattagtacccatatagtcagaaccccagtccaatgctgtttccagggcacaaaccacttgccctggtttaatggaatactaattcagaggcctaacccagctgtcaaagaaaagacagctactcgaagaggcatggtctaggattgtgtccagagctgcaacagtcccctcagctagaagtctccatctggcctctgacccttactctagaagcttccaaaagccctcacaccacctgcaggctgcagtgctgacaggatgacctatccgccatgatcccagcttgggggcaggaggaagaaggggaatgccgccataggaacagaaagcatcctggcctttccccacgcccatcttggaaggctgccaagttcaacatcaactcctgagtttctggccccttctttggcagaaagaagtctgcacactcaaatgaacttccatctgaaaaccaaggttctccatgggcaaaggcctgaaatatcaagcccaagtctccttctgcccagctctgaacagtcccttccatgcacaaggcattgctgtcacagtgtgcccaaggagggagtgagttcttcaagcagggtgtctctttttatgcttctctgggctttggtcagaacatgctggtcaccactacccaaaggccccaaagatagtgaagcaaacaaaccagacagcagcctctgggatggccaggccaaccagaaatgggcacagacaagaataagatctctgcagaaggccaatggttgtctctgttagagcagcctgctggtttcagctccatctttctggttttctcctactgcctcttccacccttgaggtccatacacccagatcctagagaatttcccaccagaagaagcacctaagaaatgttcattccatgttttaacctcttcagatccacccagcacccaacggtcacccaggaccctgggagacccacaactcattctcatttcctccacatgactaaattttccttggaacgaagaatgtgttcaagtgacaaagcacctgggagccctggcccctcccctgaaaagcagggttctatatattctgtgtcaaataaccccatcaacagctcatgccaaatccactgtcaacttacattagattctagtgccgacatgcaacaacaggtacacaaagttgaagaaagcctcacagaaaggggaaaccctacaattaagccctttctagccaccaatgtaatttttccaaaaactccaggaaaagtctcgtttattcagttttgtttttgtttttgtttttgtttttgttttttgagacagagtcttgctctgtcacccaggctggagtgcactggcaagatctcggctcactgcaagctccgccttctgggttcacaccattctcctgcctctcagcctcccgagtagctgggagtacaggtgcccgccactacgcctgtctaattttttgtattagagaggggtttcaccttgttggccaggctggtctcaaactcctgagcttgtgatccacccgcctcggcctcccaaagtgctgggattacaggcgtgagccaccgtgcctggctgtttattcagttttgatggtggaaaactcagggccattcacagacctgataaagaaagggttgccagatttagcaaattttttaaatgtggtattaggagcatacttatagggtgtgtgtgtgtgtctgtgttgttgttgttgttgttgtttgtttacctgcaattctgatctgagtgtcctgtgtctgaaaccctcagtaaggaaacatcactggttgagagccttggccacacaaatgcagctctttcttccctccttccctgatggcctgtcaccatggctggctgttctcagggtcagacacagagggcttcccttggagaatcgtgccttcctgtcctctcacaccctgctgtcagtggctgtcattcttgccctcccaagtccaaacagtacttggagatgcagaagctgaattatcctgcctcccatcctggccacctcagtgacattccatcctgatggcagctgccttcaacagggtgactcagaccttcctggacaagatttagcaagtctctctctgctccatttcccaccccccagcttgtgccccaaatgtccacctgccccctgctatcacccggcctcaccaggttcaagacaatctgaacatgactcagtggtgaaggaggtcccccccactgcctggctgcccctccacagtgttggtcctggtcctgagcagtgactcctcctgagactctggggccctacaaggagcataggtccagcttcccaacctgctgttcctggcctgttcctgagcccccatcaggccttgaccttcatcgggccttcaaagtcccacttgaccaggcccggagttactctagaaatctcatctcccccaaaatacaaaagtattttctctccccctggggtgtggtttttgcacttgcccaggacttcaaggttctgctccaagctgcttttgccgtggcagatgcccagagagccaccctaactccagccttaagccatacctctctggtcctcttgtggccaagctcggccttccacatctcagggcccaccaccttctcccctggggccagcgctccctgcacagctgcactggctgccagctcccatctggaagagtccacagtctcctgctcagactcaccgagtccctaactcccccaccccacttttatggttggagcatttcagagcgtcctttctctccttggtgtgcttgaagaagctgtgattgtgggagatgcacagccaggcccactgggagaaaagagctggtacctcagtgtctagcgtccccttgattcaagtatcacttagctgaaccataaagcgaattttccaaacaccctgtttgattggacttgtagtctgcatttacaggggccggcatgcaattgatttgactctcttcctacgaacaacagcgtgtctgcaaaccagactgcgggctccgggctgtaattaaccatgcctgacactgtggattttactttcaaactggtctgagatccttggatgaaagaagccacagtcattatgactgttcataaaaagggataccagctcttggccaagtcccccaaatacccacccccaacaggtgcctgtgcaagtctcagcagcacccgccacctgcttattttctttcaaactctgcaggaggatggagggtgtaaagagtgcccagctcttttgaagcccccagaggagctgctcaaagggacacaacccacatattctgctctgctccagccaccaacagtcccagggacaccatccaaaagaggccagttccctgggccgcccctcagatgccctgacccaggcagggaggaaggaagggcccccacagctggataagaaaagctggaagtggccaggcgcagtggctcacatctgtaatcccagcactctgagaggcggaggcaggtggatcacctgaggtcaggagttagagaccaacctggccaacatggtgaaaccctgtctctactaaaaatacaaaaattagctgagtgtggttgtgcatgtctgtaattccagctacttgggaggctgaggcagaagaattgcttgaacccaggaggcagaggttgcagtgagcagagatcatgcccctgcactccagcctgggtgacagagcaagactctttctcaaaaaaaaaaagaaaaaaaatctggaagagtccatcacacccatcgccctgcacctcctgctgtgactttgcttcctaatcttccccagagcttcccttggctgggacagtgagagtcccctgccaggaaggcccagacaccccatctcatactcaggatcttctatggatcctcaaagctatcacccaacacagagggggagcaggcgccaagggggtctcaggcctggaatgtgcctgcagccacaccctgcctgtcaagggtcttctgtggatcctcaaaactatcacccaacacagaggggaacaggcgccaagggggtctcaggcctggaatgtgcctgcagccacaccctgcttgttaagggcccagctggggaccggacggggccctatgttgagaccaggcccggccaggactgggtctagggcccagccactccaccctgtatcccagcaggtggccattgaggcactgatctgctttctggggtgagcctgccccctgcagggcctgggcaggacagccatcgcattgaggagggcagcagcctggctcattccccagggtggagccaggaagagagggaggtgcctattgcttggggtgaggaggaagtggctgaagcaccaggagtcacagaacagcgccacgtctctccacctctgtgtgccacccgctgccctcctccctccagaacccgacctggctctgaggtgccaagacaccccaggaacatcacaggcttgattccttcatcccctaggctttggggtctgggagagagcctcacttctcccccagattcctggagccgaatgcttgacccttggcaaaggaccagccccagtcttggaaagcacattggaaccacaggtcccagctctcccgctgggcaggtctttgaccccgtccagacctcagtctttccatgtgtaaaatgggcacagctgtgccaattcatgggattgctgtaaagatgaaatgaaagaaaggatgagagtaaaggatgcgctactgtgtccccctttccgttatctctttcattccggcatctcttgtgctgacatggcctcattcacaatcattggcatggacattagccaggtgccaatggaaaggggctgtttcctcatagccacagcactgggaatcagcggtgtgagactggcatgggcgtggcacctaggtcaaccctgggaaggggagcattgacccagcaggcctgataaatctgccctcacttgaatggccgccccacacctgataaagagttgagtcccagagagaatgaggcggattccccacccactgcctctcctacccttctgaccagagagccgggatgaccacctgctactcccaactcaagaaggctcctggggtagctttggcagaaacacctgctctcggcctgccctctgagcttccccgggattcctgatggggccacataggtcctcagatggggcccagcttctcagtgtccttgctggggtctgggtgaaaggctcccaggccagagtccccactgggcctagagtgcagctcatttcactgctcctgtgggcaactaccctcaccccccaccaagttttgcaaaactagctcagagaatgagggggctgcccctaaacagccatgcccggggtctcaggaagaggggctgctctgggccccataagccctgggatctggaccccagggtgccttggagcagccagggtagctcagcattgagaccccaggcccctctctcagtctagggtaggggctcctgtgctctctgtacaatacttacttaccactttcatttcccatagcttgtatctatttattccctcatttctccattcaacacatttattgagcccttataacgttctaggtatgaggatgagactgacgatgaaaccagccctacccagaaggaacgcatagcttagaaaagagaacgagaaagatcatgaccagaggtatcttgtttactgagcacttactatgcaccagtgactgttctgagcacttgactttaattaacctatgaggaaggaagacttagcagatgaggaagtcaggccaggaaggttaagtaacttgcccaggattacaaatgcagatcaggtccctgtggctctgggctccacaaacattgcactccagtcattgctgacagcacagggtcttgctgggatcggtggggaagaccagagaagacccagagcaaacgatgaaacctgagcagagttgtgaagactgttgactgttcattgctgtgggtgtctcctcctaccttcctgttaacccgtggactccttgaagacagagccttcttttcatctgcctctctttctccaggaccccacacagtgcttggtacacagtggtcactcaatagatagctgctgaccaaataggttaccaaaaacgttaaaaggtgccgggagcaagggcatgtcctgtttctctttaatgccttagctcctctggtgctgttccaggcacgtgaacttgagccgagccccaccttgttctgtaggaacaagtgggtggcggggtctggggtgggatttggaatggtggagggtagacacctttctgctagtttagcaagctgggccaggcatgtctgagcaaccactgtgtgaataagacaactgtgtgcagcccatactcaggcttgaggtgggggaagagaaggaagacaaggaagggggagaccacacaggggagcagcagaggggaggggagggaatatgaagatggtgccagaggaagggggcagatggccagggtgccggaactccatctaccctctgccttaagccccttaacgaaaatcaaatggcactggaggggcatttccccagtttgttcattcacctctgcctttcatcagcactgacagagcccacctgcactctattggatgagagacccccccccccccgcccgctttgaggaaggcacagccctgcctttctcactgtcacttcagtgacacttcagcgatactgtcagttctaggacaggtgggcacacacatgtgaacacccaagtgtgccccaccccagccaggtgctgcagaggagggggcatccatctcagtctgaattttgaataaaaaactggtagtctccaataaaatgatgacaggagtgtggagagagaggagagaagaaggttgggtcagacagaggtctgtcaccgaacaaaatccccagggtgcccagccacctgcctgcttcctcaagggcagtttgggatggcaggaatttggggtgagtgagggaggctagtgtaggagccagagctggggagaggccagaagaagctgcaccaccaggacctggaggcaggcgaggtgtctaggctttcctcagtgaccagcagggagcgattggggtgtctctaagctgagaagaagactcagtttccagtaatcacccctgctggagtgtggagcatggaggcagggaggccagtgaggaggctgtggccacgtgcccatagttaggaccaggaaggacattatggctaatgcagtgtccacgggaagcattgtgaagggggtgagggacagaggaggccaggatgactcctgggctcctggctcagctttccaggttctccgggataaagggcaaggaaggagcagatctgggaggatgatgggagctcttttgcctgggtggattgaaggaggtgatgtctggctcactgttggcaatgggagtctgaggctgggaggggcctcagtggagattcgagtttgggcgttatcagaacatacaggcaactgtaaccatggttatgtcctggatgacccacagggacagtgaagaggaaaaagagaagaacacccacaccggaatccaggaggtgagtcaacgtgcaaggagtgagcagagcaggaagaggttgcgaatcagagcaggggcagccaaagcggcagggagagagtggggagcacagagagaaggggccaggttagtgcagcggccagccagggagctggtcccaggagtggttgggagtggcaagacctaggggtgggctggggaggacattaggagtggatgcctcaggccaacaaggagccatttgcctgagaataaacctctctgcaggaagcagggaggtggcaggtgggggctgggcctccttctccccagatcaccccttcactggccccttgcagcctgccccagaggcatctgtactttttgcccatgtttcacgctcccttgactctactatcagctgccattctcactgaacatcctaatctgcaaggctgttgaactggctcacgtgcccctgcgctgtctctggtgtgttccgtctgtccatgtctgctggacaccatcgtctgtgagctgcctgtgtcccctgtgtttgccgttgttgtgtctgtgtgctcagatggcccatgggcctatgtctgtccttcctagataggaagctccccaggcttgtcgttgtctggattagctactccgcccagctgtgtccccctcacccgctaaaccagggccctagcaggggccacctaagaaaccaggccagaatcaaaaatatgtttgcagaaaggcaggaaactttattgaataatcttttctttggggtagagaagttgagaaaccaaagcgtatccaggtcagagaggagagagatccgaccggaagagaagagcacagagggcccaccatcaggagagagtcaggacagggggtcctgagagcagagggactgagccttgggtccagcagcccctcctctctcctgcagggaactgccggctctctcctcctctgggtgctgaagacagagggaggggacgccaggcagatttaaggcctacggacatcagaagtgcggcgaccagaggcattagaggtggtggtaacagaggcactagaagtcgtggtaacagaggtgctacgggggctgacgcttcctgggaaacaagagacaagacatgctcaggctggagaagacccacctcaggacagggcagggcccccctggagggctcacaaactcctcattagtcaggtggtgcgtggatggagactctttattgtccccaaagatggctcttcccaagacagccaaatagctctgtggggcagagccatcagtttcaaaaggaaaatcagtgagcgaatgaccacttccaccccagctctccccctccctacactggagagcccagcactggctccctccctccccgccagctcccacccccattggggcagtgaatgggaggctaactctgcctccccctacaccacggggctgttcccttacctgctgaggaagggaaaccaatcatcctgggagagaggacagaggtggccatgagcagagggtaactgagggcaggtgcttacctgttcctctggggaagtgcctcggcttatcatttcaagcccctgggctggactctagtgcctcctagctgtgcccccagctcaagggacagcagcatcaggtgcccactgggactgtctgtctttcctgtctgtctgtctgagaggtctcaaggggagatattattagccacaagattcagggtgtttgtcttccctctggatcgcccaaacccgcaaccctccacctgagccctgagcccacaggggtggcttgatttctgcaaagggtctaaaggcagttaaagcaccatagtaatagctttgttcagctgagctgtatccaagctcatgtttttccaatatcagatgttccctccatggtctctgttccctccagtctaacttggaggcccaaattagaaagtttaaaggtgttaaccctgcagcctaccaaggaaatgtccccgtaaagtcagacagtgaggggtctcctctctgacatgagggggtggatctctaaggccctgcctgctctgacacccacgggtcctgcagtcactatcctaagaaagaggctggagaggacctacttggcgtcctggccctcgagcaggctgcggtaggtggcgatctcctgctccagacgtgtcttgatgtccagcagcatcttgtactcttggttctggcactccatctcactgcggagctcgctcagctgggcctcgatgctgctgatgagtccctggatctgctgcagctgcagggcatagcggcactccgtctctgccaccgtgttctccagccccgctttctggtggagcgacagacaagaagttacagagggagccaggccagagggaaacctagaggtggtcgccaccgggcaggaggctgcaggcataccatgctcagctgggactgcagctcaatctccaggccttggagcgtgcgcctgagctccgtgatctctgtcttgctggtctgaatcatggcagtgttggtagacacctccttgttcagctctgcactctgaaatgcaagcaggaagaaggtggtggggaagctcagctcgagcagcctgaccaagaggctgtgtccgcccggcccccctggctatatgggatgggctatgtggggtgggagggccgggtaccttggtgtggaaccattcctcagcatcccggcggttcctctctgccatggcctcgtactgctccctcatctctgccagcacgcgggtcaggtcaatgcctggggtggcatccatctccacgttgacctggccgaccacctggttgctaaattccttcatctcctgtggggatgggaaaggaagatgtgtgaggctactcatcctccctctccttggctctgagtgctggcagagtgttctggagagtgtttccaggtcccacagtggaggactgtgtccagttgcaggggagggctcctccttctcactggaggttgttgagcccagggcagcctgcaattcccgctcacctcttcatggttcttcttcatgtaggctagctcttcattcaggctctcgatctgcatctccaggtcagtcttagacagagtgagctcatccagcacccggcgcaggccgttgatgtcggcctccacgctctggcgcagggccagctcattctcatacctaaaatagtaaaaaaatgaaatgttttttgaaaaagcaagacataaatgatatgagacattctccctacccctgcacgagactccagtacttccagaccttcactcctgggatgctccagtgtcattggtcagatgagcttttgtctaaactaagagactcctgggaaaggagagggagggggaaaaaaaaaactcacttgagcctgaagtcgtccgcagccagcctggcattgtcaatctccaggatgacccggttgttttcaatggtggcggtcaggatctacaaaatgcagaagaaggtaacctctagggcatgggtgtccagtctgttggcttccctgggccacattggaagaagaattgtcttgggcaacacatcaaatacgctaacactaacgatagctgatgggctaaaaagaaattggcaaaaataaaaaataaaaaaaaactcaatgttttaagaaagcttacaaatttgtgttaggcctcaatcaaagctgtcctgggccacatgcagcccaccggccacaggttagacaagcttgctctggggggtccacgtgcttgaggaggtggcctgggaaaacatgggcaggacctggttcccatggggctctacctctaaactgtcctgtgagctgggacaaggcatttccctctgggcctccattgctcttctgtaaagtgaggagtggggctgcatcccctccaatcgtttctaacactttaatattccatgtctgagcaccctgggggagatgcagggagtgcatttctgaggaacgacctgctgagaacatctttggttcgtcatgtcttggcagcctcagactagcaccctccctaggccactgtcttgagatccatcccctgaaagtcaggagggactcggcttggtgccacatatctcacaatcactttgctagagctgacttcccagctgagtggaggggaaatccaacaaatattcccatccctttgaatttcttgtctaaacgtttatattccaaagcagtgaaagcctgctccacatggctgagactcagcccaggctggtagatttctgctccaacaggctggtatcacagcacaacagacagggctcaacaaagggcacccaggctcggcactgcctaagcctctgcctctctctcccccaacttggccatcgccagttgagaataccagtttgaatgggtcccctacaaagtaaacaattattcccagggcaatgaatgaacacgtctctctttctctgttgatttcatgcattcttaatggcttttaaacctgtcatgtttccagataactcagtaggttaggattatagagatcgagtcatgaataacataactgtctggaaagcagtaaaaaaactgacctgagtaataacaatcataaaaatgaataatgagagaaaatgcatttggggagttgtggcatgagaaagcccatcagaggtagagactcttggtagtcaaacagtaggcttttcccctgcaagaagtttgtgaattccgtccacacctagtcccccacaacactgtgtttcttggccttggaggctctgcccttcatggaggacccctcctcagcttccaagggctcaccttgtcccggagctcttcaatggtcttgtagtaggggctgtagtcccgctcagggctagctgggctctgcttcaggtgccagtcacggatcttcacctccaggtcagcgttggcctcctccagggcgcgcaccttctccaggtaggaagccaggcggtcgttgaggttctgcatggtgatcttctcattgccagtgaggaggccgccatcacaagcaccaaagtcaacaaagccaccagcaaaacccccaccaaagccacctccaaggccacctccatagccacctccaaggccacctccatagccacctccaaagccactaccagcccctccaccaaaaccacagctcacgccgcctccatagcccccagctgatcccccggacacaaaccgagttgaacaggtagagacaccacggcctcctcccagctggcaagagccacccccgaaaccacctccatagctggcagaggagctctgcaggcggaggctcatggtgagagcaggattgagagcaggtgcagatagaagcttgcttggcctgggccgaggactgtggctcttccccagagtggacaccttttatacacctccataggggctggttatcttctctcctcccttccccaccctctgacttggtgccaactacacttctgtttcccacaagcttagttatctctgatctctccagggtgggttgtgccttttgggggtggctttttttttaatccttaacaaaaagaatgattcagaggggacagcattctgcctgagactgcccttttgacaagtgaattctgtttcacctccacttaaggagttcactgtgcaggctctgagccccacccagtattagaacgggacctgagatgcggaggcctgccaggagcttctgcgaggaaagtggtgggtgcagagtggctctgtgctttgcaaggtcaccgtagccctcgaccttccttttttctatacctaaaacttctgactgggatgtcctggatccttcttagcacttcatctactccaggggccccagcaactctgatgacaaactttgcttggttcgatagaatcacctgccttgaaagtatttagactgagaaagaaatagctccgaggccatcagaaaaagtcacagtgacagagaccttaagggatcttagggaccatcagacacagctgtggaaactcaggcatggaaagaggaagtggccctgtccattatcatagcgaatattctccgagccctcaccataggcaggaactgggtgaagttactttacactcatcatctcatttaaccttcacagcagccacaggaggagggtcctactattgcccccatttacacatgaggaaaatgaaccttaagggcagaatcaggactgaaatccaagtctggttctgtctgacgctaaggtgcattttttaggtacatttttcatacagtaaaatgtatagatcacgtgtccagcttgatgtcacgcatgggtatgcacgacctgtgtaaacaccacccaggacattcccagcattccataaaggtccttgtaccttttcccagtcaattacctgactccacacccctggtgtaaccactcttccaacttctgtccccatagacaagttcagaggtcctcagctagaggctgctttgctctccaggggacgtttgacaatgtctaggaacattttggttgtcacaacttgggggcactactgatagctaaacaccaggtatgctgctaaacatcctataaggtgcaggactgtccccacagcaaagaattatcagacccaaaatatcaatagtgttgaggttgagatgcctgggtcagtctggccctcgggttgaatcactccattacgctgactgctttagggcacagtcacatccaggaagacggccctgtaataatgtgagcagggtcctttctagtacgccagtcatatgaggtctgtcccagccaagaggccacataagaggatgtgacacaggacccagggccagggtctcagcttaggatcctgagatgtggctgagaaactcagggactatgtaagaaccctgccagagggagcttccccattcaggctgggagaaaaggacctcagatggcatctgtgaggccaggatagaaggtcctccattccagggctgacaatggaggaccctgaatgcagactcccaggccccactcaccaaggggccagggttgctgtggatggcatcttgggagcagctttctggcccacagcagccacaaaggtctggatgataccaggccaggggctgggtggggtggcacaggcatgaggttctcctggaacccccttcactgattcagcaagatcagaaaggagaaatctgagtcagggctttctgggcctttgttttctggggtagagaagcgggcctgtgcttcccgcaggggtatcagcagggacagagccagggcacgttgccagtgttctaacagccttgcgaggccagggattcaggctaacccctgaccctgcccggccctcctgcccaagctgatggctcagctctctctctctctctctctctctctgaaaaggggtgattcagcccaaagcaggagctcttgctctctcggtagaggatcaaaactgacaagaaggtgattaatggaacctgccatgcctggggtaacaatgccccaaacctcccagagctgacaagcaggttcaggccaacgcctcttagagtaacaatgctgcagatcctccaaagccccagtaacacaaacacggagtggcccgtgacattccttcctttgcggggtcagggcacagcctctgcccgcttagcggggacttgtaatgccttgacacaggactgccttcctccaacccgcagtgaatcccagagccctctgggaggaagctaggcagagatccaaccagggacccatcttttttcctatttccaccctggtcctaatggaagaaggagagagcgctggggctgaggcactgctacctcgtcttaagctttctgctttgttttttggcaaaaacaacaacaacaacaaaaagaaacccaatgactgcggtctcctcccaagaacgtttcaagggaaggagcagcaaaactgcattatgagtacccctgcaagcaaggctgggcttaacacactgtcaccaagtctcacaacaggagagggtttaagtcagccccattttatagatgaggcagccaaggttcagggagggaaagtcacttatccaaggataccaagaaagcaagatttagacctggcttctggccttctctaccctgatgacatctcagcaaccttgctgtgaattcagatgtatgatctctgaatgttcttaaaacccttgtaattccctgagtaataagggtgctaggagcatcttagttctaatgtttagtctttaagcccagtttctgacatagaacttttactcccttagaatctcctagtgaaaggagcgtcttctgttctaatgaggtgattcttggtgagctcccggagggaggctggtcaccacaaagactttcagcccaccccatcgctggtcctccgggaaggggagaggggccggacattgagtttgtaattgactatggctatgtgatgaagcctccatacaaatccttaaactatggagttcagagagcttccaggttggtgaacaagaacacatccatgtcccaggagcatggtgcaccccagcttcacaaggacagatgctcctgctctcaagacacctctgcacctcgccctgtgtatctcttcatctggctgttcatttttatcctttaaaataccctttgtcataaattggcaacaataagtgcactgttttcctgggttctgcgagctgtgctaccaaattattgaacccgagaagggggtcatcaaccccttgtggtgatctgtagccaagtcagacagaagttgtgggtcacctcgggacctactctttgcagttggcatctgaagttggctgtgggggcagcctggtgggactgagcccctaatctgtggggtccgtgctaactacagttagtgtcaaaataacattgacttctaggacacccagttggtttcagaggattgttttgtgggaggacacagaactgttctatgttgagcatgggtatagataggaaaaagtaggggtttttttctatattcacattctatatatgttaaaagataataaaaataacactagctaacatttattgaagcctcggttaagcactccacagatgtaatctcattcggtcctcaaagccactctattgtttttattatacccttttctcaggtgagaaagctgaggcccagagaggttaaacatgtttcccaaactcgaaagtgctatcgtgtccatggtaagcccctttcaggccagtgctggcaccatccccacccaagcaaggttatcttctgtggcctttccctttctcaggccaacctgtcaccccaggccgggccggtggactgtcctgcttcccgcccgtgggagtgctcattcagcacaaaattgttgtaggaactttctcatccaaccccctcatgtcacctgtggggaatctgaggctcagaatgccaaggcccagaatactgaagtccaggaataagcggaataaggggggaaaaatgcatgaatttccagctgtaccaccagctcatcatgggccatacattgaaatgatttctaagtttccttcagcaagttgcctttctgagtctctgattctcaaagatttgtccacagtcattagattgtttatctgcagaggtgaggcttcaaccctgtcgctcagactctaatctggaattcctttcttggatcaggcacctctctccctggactccatgggacctagaatccaggatgactgaccaacctcaaaaagggtctcaaggctcctccacagggaagaggcctctcctgaaaggcaacccttccccagagagtcaccccaggccctctgggcagctcccactcctcagagatgcctgcttggcacagcaccacccagaagtctttcaaggctaagcctcaatgccttaggctcttgcatttctacagcgcccaactttttaaaatcccttttacaccaccactggcttctcagatacccagtgaactcagcaagggctttggacagggtagacctgaatttcaatcctccatccaccaccgactcactgtgtaatcttgggaaagtcactcaacctctcagtgcttcagtggtcaccactgaaaaatgggcactagatgagttaatattccaggctcctcagatacctgagacacaggaggtgctgggcaggcaggaggttgctactgcctcccttttacaaatgaggaaatgcaagctcagcattgctcagtgacctgtcagaattcctctaagcctccacccagcagggacacattgctttgcttcccttccttttctggtccctacagtcagcatggcgcccacagcaagcaggcaaatgacaggaggtggatttcctaatttacttctcccactccatctcaggttgcctgatgatgggacctttgctgaatatacccccaaatcctgctcctggcacaggaaagctcaggataaatgcctgagatgctgtttcggggacattttgtcccctggctttaggtgaggattggcaaacatgagtggtgtccaatggggtcaccccagctccaattcaggagagctgctggtggtaatagaaaaaaaaaatctcaggagaaaagctgtctgctccttatttcccccgtgctgccagctgcccatggagggacaggtggccaggtggccaccaggtgggcacatgcccagcatactgatgaatgtctaaggcaggaaaaagcaaaggagaagcaagttcacgcattaaacaaatatttatttagcactcgcactgaaaattcagcagtaaagacagtgaacatagtccctgctgtcacagcctcccgtctgaggtcccaggatacagatcatctcatagagaccctcaggatcatcttgtccagccagactcccaattgaaaagtggggaaactgaaacccagagagaggcaggggccagccacagtcctcagggagatagcagcaagcatgtcttatgcctggtctaagaagcccagcctgagcaggggacacacccaaggccctaatctctggtcggaaagccgccctctctctatggggagaagggaggggcatcacccactgcctgcttctctgattggctggaaaccaagcctgacctcagcccagggcactcagaaggtgtacccttgctgcccagagactattaaaggctcagcagggcatgagccatccctggatgcaggtgtctcactccagggtcaggttgggaacgggacttggcaagttccgaggatttctctgacagcccctccaggcatcccaggagagcagaaacaggtacttcagggagataggagattttcctcctacccccaagccagagtctggcccagagagaaggcacactggacgcagcccataggcgaagtcatcttgcctctctgcacctttcacagtcgttgttagttttggaaactaaaggctgagaaaaccctttgctggctgtttgggaggcctgagacctcttgacagaggcccgaaggccagtgaggcagaagcagcagccaggccaccagcttctactggcaggagccgaagagaggtgggaaggagactggctgttcccaggacgtgggggatctggcagctagctaatggtttggatgtcagggtgaacttaaaccacagcatgagagactaaggttagacgtgaggacaatctttctgacgttaatgactgtatggcatttggcatgctgcccgcagaggttaagaaatgggtttctgtcgggcgcagcagttcactcctataatcccagctactcgggaggctaaggcaggaggatcacttgaggccaggagctgagaccagcctgggcaacagagcgagacctggcctcttataaaaaatttaaaaacaaaagatgggttttagatttttagttagcatatctcttaagaaaagtgttgcagcttctgtcacctcacgacttaaagggcaaagcgagggtctggaatcagagcgaccagtcccagacccagcttcaccatttcctggcttgtgacctcattcaggttactaaacttctccaggcctcagtttcctcttctgaaactgacgctgaaggctgatactaacttaaagagctattggaagaattaatgagatgccatcccggaatgcccaacccagggcctgacatatcatagacactcactaaattccatttccttcctccagccccaggaagtctcacctgtgtgcgttctcaggagacacattcttaattaaatctcccctagaaagagcaggcaccactttacctccaaccaggggtttgtggggaagaggctttgcacaacaagacacatggggaccctctcagagggcttgacccttcccccaaaagatcggattctccaaagacagaagcacctccaatctgctcttcccagtgagaccaagaaaccggttctccctccccacccccaattctcaccccagttcctgagccagcccagcctctgcacccagagttctgtgcttcctcattttctgccctcggtttgggacgataaatgcaagagctcagagaaaacagcctgagaccagaggccacaaacaatgtgtgcatggatgctaccgctctagaaggactctggtggagatgctggggatgggggagcaggagcaggatttggattaaggagggtaagaggggttgatgatgctttcaacttaatcttgggaaaatctcgagggcttcctggagctggtgtctttccctctgggcaatataagtgccttttgggaggaggcatcagcttcaggggggatggggccagctctgcaggggagtcaaattgggaactggctcggccactctggaggtgttatgcctggctagaaaggatgggagattggagcagcacatgtggtgagggtcagaagcaaggagcagggtcctggcagcaggctgtgaaaagggccctggggtcctagagcaagccctggtcttggagtcctacagacacaggcccaggcccagccctgctacttatcatccatccacaaggcccggggcaagttattcttctctctgcctccagtgacctcatctctaaggtgggaataataaatcctgaccacctacagtggtgaggattaaatgagccccatgggtgagcgtgcctggcatcatgccagccatgggatggcgaacaaagacaatcaacgcgatcagtcacttggtaaatattcataattattagatgtgttgagttctgtgctgggtacaccaaactctttttagggaacctccccaccctcacttccctggtcaccccatggtgacccagaagagcaaattacctgagtagcactatgtttgtcccagccactggtgccctgggtacccaaaagaattgtggccacgcagggaagaggccaaagtggggggagatatcaccatgtggaccctgggtctcctcagagatcagaggccaaccaggaccccatcaagaaaaactggacatactgccaagagatatttgcaaaaggaaaagtaattctttattacatgaacagacactgtacaaatgagcttgttacacaatacagctgcatctccttgctccaaagaaggtggggagaggcagagggggaatagagcgcatgcaaagccctgaaataaaagaccgagggacccttttcagctctctgaaggcagggactggagtttgcatgtgcaggccctctggccagtcctccacttggcctgatgagagtggggagtggcaagggacgtttctcctgcaatagacacttagatttctctcttgtgggaagaaaccacctgtccatccactgactcttctacattgatgtggaaattgctgctgctaccaccacctcctgaagaggctagagagagaaggagtaggctttagagtgggggaacctccccgctctgccacggtggccaggaccttggcggggctctgggaaaactagacagcacccctgagaatggccactggccaatccctcaagagctgccagagatctggtgttgaattcctcatcacagagatgggcagtggcaatggcaggtatgcccggcagggagcaacaatgtcagggtttttcaagctgcacatgaagggggatgaattgtgggcatcttagcggaagtgtatgaagatggggcctgggggagagacatgccctgaatgaagcctactcaacctggaagtttctcaataaatcaccagctgcaatctcacctggggctgacagaagttcccactggggaagaggcatctaatgaatgggaatgttcccacctaatgggatgtttgggctctttctccttcctccctattccgaagggggtggtggcttcaacatctcccctccccaccccacaccagaagagtaaagccttcctaccttccctgatggcaatgccagccatcctgaaagaaagagggaagctgatttaagcaaagggcacaagctcaagtgtccgtaagggaagctcatgtagatagctatgcagtgttcttcagaccctacaccaccaccacccacacatctgactcctctaggggtgggacatcctgctagcccatccaggcctgctatccccaagtagacagattttgttttgttttgttttgttttttgagacggaatctcactctgtcgcccaggctggagtgcagtggcacgatctcagcccactgaaacctccgcctcccgggttcaagtgattcttgtgcctcagcctcccgagtagctgggattacaggcacccgccaccacgcccagctaatttttgtatttttagtagagacggggtttcaccatattggccatgctggtctcgaactcctgacctcaagtgatccacccgccttggactcccaaagtgctgggattacaggcatgagccactgagctggtcaagattctgaactacaagaatacccatctatctcatgcagagaatggaatgagcactagatcttaactaccactagcccagcctctatcatttacagaagaaacacggatccagagagaggaagtgacctgtcccaggtaacagccaaggaccagagtgaggagtccagatcctccctccttgctcagttctcttttcacagtccctcaaggctgcttagggacaccctgccattcccttaggatgaccctgcaccctagccacaagcagccctcatcactccttcccctgtgcccaggcgcctacttggcatcctggccctcgagcaggctgcggtaagtagcgatctcctgctccagccgtgtctttatgtcaagcagcatcttgtactcctggttctgagcctccatctcgcatcggagctcactcagctgggcctccaggccaccaatgagcccctggatctgctgcagctgcgtggcatagcggcactctgtctcggccagtgagttctccagcccagctttctgggggagtgacagatgcatagacacatcaggctagaaaggaagccactgagggcaagcagggagggggcactgaatggagttcagggaaccacctcttgagggggcttgagaactccaaggcttaaatagccaggaagagtgggagcttctaccacccgagaggctgggatggggcgcgagtggccgtaccatgctgagctgggactgcagctcgatctccagctcctgcatcgtgcgtctcaggtctgtgatctccgtcttgctggtctggatcatttctgtgttggaggccacctctttgttcagctcctcagtctgtaggtcatgcacaacagaagtgagccccggggcctcctcggagactcagggacctggggcaggaagggcagggcaggatataaggcccaccttgctgaagaaccaggcctcgacatcccggcggttcttctccgccatggcctcgtactgctccctcatctctgccagcacacgggtcaggtccacacccggtgctgcgtccatctccacattgacctggccggccagctggctgctgaactccttcatctcctgcaggatgggagggacccacttagagacggagagcagaagagagacctgagagtctggcgtcacacatgccaatcctggctctgcccgtaacacaccccaaccgctgttccccattgcacatgaagaggtttggtcacatggacccctcagctctaaggagttctctgctgctctaggtcctaccaagggaggaccccgagactgtagggccctgatgtgagctcacaaagccaatcaggaagtcaaccattcatacgggccacctgggctggctgtgggcctgggctaccagacactgccccttcctctccatgaggacacctggttttgtggggtaggtgtgtttctgaaccactaagccccaggccaactatgaggaagtaccaacagccccactctgcctcccactgacttaatctcgtgaaaatctgggagggcttcctggagccactgtctttccctctgggcaatttaagtgagttttgggaagaggttccccacctctctcgggttcaggggtgatgggggccagctctcacctcttcgtggttcttcttcaggtaggctagctcctcattcaggccctcgatctgcatctccaggtcagtcctggccagggtcagctcatccaggactcggcgcaagccgttgatgtcagcctcaacgccctggcgcagggccagctcattctcatacctgaggagagggaggccaaagaaggaagtgggaggggtcttggctgcctgagtcagagccaggagaaggccaagtaaagtgggcaatgcaggaagaggagagagacgggggagcgcacttgagcctgaagtcgtccgcagccagcctggcattgtcgatctccaggatgacccgggagttgtcgatggtggtggccatgatctgcaggagacagagtcggtgtctagaggactcctctctctcccctgctgctctctgctctgcacccaaggccagcccctcattgaaaatcacccctcactgacaatcacccctctgacaccaccaacaaaaatctgtacggcttctggggtgggcaaagtccagcctcactttcagtgtccatttcttgttttgtcccatccagcctccttgagacacctgaggagctgccttccttatctccagggcacgaaagaccaaggaggcagtattgcctgtgggaattggttgcccaggagagtggggcagtggggtgcagccagctctgacaatagctctctcagagacactccaccagccccactgtggacaactcatggtcactgcctcctgcacaccttggacacagccatggatctacagaacattccagccagtagcaacctggagggcagttaagaaggcattttacgaatgaggaacccagtcttagggagtaaaatggtgagtgagtgggtggcagaatgtgtaatgagttcccaggtctcctaagacccaacagtacttttggcacaaaagacctctttataggaaaagacaagaggttctagcatctggaactcatgaggccacactccaatcccattcttgcaaaagaggtaaaggaatactttatgcagaagcctgcagggtgcatgaggtagggagggcgagttgctctttttttttaattatttttatttaattagatacaggttccactctgtcacctaggccggagtgcagtggcacagtcatagctcactgcagcctctaaatcctggacacgagcaatcctatcaccttggccccccaaagcactgggattacaggtgtgagctactgcctctggctctttataattgcccccacctgtgcccctgttggtcctaaccagattcccaagacccctctctccctcccccagcaccaccaagttgagaagatgtgcactggcctctgcacctggacagcaggtgcattccaaatttgctgagattacataccagacagtcattgcctgggcaggaaaggatttccttgagtcagcagtaacactgacattagagctgtgtacagggtaccagccacctgctcccctctctttgacatccgaggactcaccttgtcccggagctcttcaatggtcttgaagtattggctgtagtcgcattctgggctggttggggtctgcttctggtaccagtcatggatcttcacctccaggtcagcattggcctcctccagggcacgtaccttgtccaggtaggaggccaggcggtcattgaggttctgcatggtaattttctcattgccagagaggagaccaccatcgccaccaccaaagccaccaccaaaacccccaccaacgccccctccaaagcctccaccgaaaacactaccagcccctccaccaaagccacagaccctcatgccacccccatatcctcctcctgaccctgaagagacaaacctagcagaagaagctgagatacttcggcttccacctcccccagagagactccccccaccaaagccacctcccccagccaggagggaaccccctcgggttgagccacccccaaaggtggaggaagaagtttgcagaaatgtggtggtcatggccaggtagctggagcccgtgagttctcagcaaacccaagagatgctggcaggaggtaccaggccaggctgcacgctggggctccttatatacccttcagagggtgttgtgggacctcgtctcctcccctaaagcaaagccaactccttctgccttcctgacaaacacagctgcctgcacaccttgagtgggtcatgtgaagtttttctcttctatttttttttaatgcaacaaaagagatgattcagaattaatagtgtttttccccagggcacggttttaacacttggattacaggttcatctctccatgccagaagagagcagcagggagcgaactctcatcacagcacagctaccaaggcctctgcctgtactgagagcagctcaggccaactgtgccctcagctggacttcacttccccgagccctgagcctctccccaagaggacagctccgtgttcttagtttgggagtccactggccgatcattatgctgtgttatccaactcaaaaccctgtgagtgagtgagtgagtgaatgagtgagtgagtgagtgagtgagagactgcagggctcagggagagtggaggccctggggatgggaatgcagggcccctgggggcaggtggaggacaggagccagggaccttgagtagtgttccagctgaggtgaccagaggagccagcatccatccccttacctggtgctgcagatggactcccctcctcccacctctactcccctcctgccatcctccagcctgtgttcctggcaccctcacaaaagcccagcaggcttgggactgacaaggggatgactgatgatcccgacacctgccaactgcacggcgctgaacctttgctcgtttctgggatgtgttggggcaaacctccgctgataaggctggggcaagttccaggaagcccctgccttctccaggagaggcatgtcgctgcttagcagggccagattagcccccatctgtcctgtcaagtgctggctggggacgggccgctgcagaaggctctatgtgcctgaatgctgtggaagggaagagaagggagactggcaggcaggctggaagacaccggagatcttgaagaccaaggcattgcttcacacagacggggagttgaacactcaggagagcccttttctctgccaccagctcagggacacctttccagggacacctgatacctgtgggcagtgccacttggaggtgtggctcagccctctggacctggccccagggcttacagaaactcaggaggaggattcctagcccaggttgcagcatggtgaagtggacagggctctggagtccctcaggcccgggtttgaatcctggctttatcaattatcatggtaagactgtgaggcctgggttcaaatcctgaccctaccaattaccatggtaagactgtggacatttacctttttaagtctctgtttccctgtggcaaggggcgctctcaactctcacttccagggaagccctgtggcccaagagcccccatcctgccccctcctggatccccacccaggtgccagacatgcaggggccagggtgcatgaccggcacctgcgcctgagtgccctcaccaggaggggctttgtcgttgggcatcagaacatgccctgtgagcctgagcatgttcttaggctcaacggcatcgaccttccatagccagctcctatggggcaacgcaggttgttcttaggttcttattttgctataatagcataatcctttacttctaccctgcactttgtgatttacaaagcacttttgcatccatcacctcctctcatcctcacaacagagggtgacccccacccaagattcagaaagaatgaaattgaaacttggagaggtgaagcaacttgtgccaggtggcaccactggtaaggggcaaagccaggactcaaacaggtcctcacaccctcaaccaaacagggcacagggaaagagtccttcctgcagaccccaaattcctgcatctgagctgggctggcaaggggaactgccagccagcaaggctgggggtgggttccttctcatccatcttcgcagtgagcctggcctccaatgctgggcacagacagtgtggtattgtctcatgggtgggagggtattgtcttttcctccgaaagaaaaataatcaaactcagatcatccagagctcattaaaagcctctgcagacattgtggccccagcaattaactcaagaacaattactcgcctttcaccccagggtgaggaagggctggaccccagccagatccccttctgcacctgactctcctccagcagcccctcgaggtggctttctctatactctcaggcccaggccaggggcggcagctgcccccctcactgccccacgcacaaatccctggtttcagtccaaaccgctactgtgagctccagatctgggtggggcccggagcctcctcattagcaccaggtgggatggccttgcgaagataaagctctgtctggccccagcccaggctgtagccccgggccctgccccaggcagcctgcccaggatgctgtgccagtttctgacctttgcccactgcagccagatggggccatctgtggagctggccttttctccttagaatgaggcagtgcagcccagtggaaagagactcagcctctctgagcctggttcctgatttaaacttaggccattaacacagactcccctcagggccatagtgagcatttgagggcacaaggagaatgaagtctccaacaaccttagaaccctcccacacctctcctgttccccagggaaatgccagggagagggggtgtgtcctggagcccagagacttacctttaaacccctcttttcccatttaccagctgtgcggctttgggtaatgccgcctcctctctctgagccttagtctaccaatcaggaaaatggaaataactccagctcagcctgactctcagttggagcaagatgactcacaggaaatgctcaacagactgaagtggccacgatgaccagcaggatgtaaaggcactcccctcaacttccccactcccctctccctcctatcccaggtctccaggctgagacagaaaagtgtccccagtccagccccaccctgcactgtgcacacacaaaggcaggcttcattcctgacactcaggcctgagacctgacagtcacctgccccacctgtgtgggcccagaccccgccccgcagccacattccaggggcccctgaggcagagggaaggtttcagctgtgacaagggaggctttcatgggcagggacaagcgcctctgggcagtcccagctgggggtgcagccaggcctctccctccagctccaaggcttcctgagaagttaagttgggggtggtggtttgtgggtgctggaggccagaacaggacagctagggagggggcagaagggggtcccagtccaggctacagcagcggggctctggggttacatgttcataaccaaccttgaaacagctcctccttcgggattgccatggccgtgatggggtctccagcctccttagcagggtgctgagtacatttggcagcatgcgggcgtggaactagtgtccctcacttgcccccatcactcatagggttgggcctgcagccctcacctctccaccaggaagaagtgggacttcttttggggcctcttccttaccttgaattggcctcagttcttggcagctgagatgtaaaccacaggagcagggccatacctacccaagggcagagttgtaccaggaagctgggacttcgttcttttgctggcccagggcaggccccaggcaagccagggttggggtctctgtgggaggtctgggtcactgctgggtcccattctgggctctgggcccaggtatgggctggtgggcgttaaagggcttatgcagggctgccccaaaaatgggtgaatgtgttagtgcatgcacacacacaacacacactgacaggtacagcctccccagccttgctccaagcgggatgcctggccccaaacccccagtttcagtgaggtggagaaatgtgtcgggaggaactgcccctagggatccccggcctgagccttcatagggcacaagactggaatgtcagcaagaccggcacaagtggcgtcaactccaggagaccacctggcaggggctggcaccatgggctaagaatcaggcaacttaggttctagtcctggctctaccatgtagttgctgtgtggccttggacaagttactgaacctctctgagcctatttcctgatctataacatgcagctcatactaccttttagggctgtttttaattcaatggcacatagtaggtgttcaataaacattaatttcacacagatacctcaacgccctggggagtagagtagaaagaaaactaaatctagaagcaaaaacaatttcaaatcccacctttgccatgcattagagcagttacatatagaaaaaaacacttcacctctctgagccttagtttacttttgtaaaatggaagcaatgcttatttcatgaggttattttaaggaacgggttaaataaatgaagacttctgtaaacaggaattaccattacaggcaaagtatgtgagtaccctcccctccctttcctgggacagagtgaactttggttcaaataaaacctaaacagggccaaggcaggacccatctctccatgggctcaaataacaaaccgaacgacctattctctccatgggctgaaataataaaccaaacgtccttcctcccttggaccataaatttttattggcaggtcaggagaagagccgggggtaagggtcccttccttcccatccctctacccagaagacaccctccaaaggacagcagaagccccagagcctgctgcctcagaggaccttggaggcagacaaattgttgtagtgatcttcctgtccctcgagcaggctgcggtaggtggcaatctcctgctccagccgcgacttgatgtccatgagccgctggtactcctgattctgccgctcactatcagctcgcacatcgcccagctgggcttcaataccgctgatcagcgcctggatatgcgccagctgggctccaaagcgcgcctccgtttctgccagtgtgtcttccaaggcagctttctgaggatagggagagggggttgtgactcagcagagcctggttcccggagagggcatgggcacagccaccggccaggctgccctaggctgcaagggtataagtgtgaattgcacagggaagcggcggcggtggggggacacataccatgctcagctgtgactgcagctcaatctcaagaccctgaagggtgcgccgcaggtcagtaacctcggacctgctcatctggagctgctccgtgtggccagcgacctcccggttcaattcttcagtctgcagagagaggaagaagagggaataagcattgagtcagaccttcgcgtagggaacacaaagccctccccttcctaacccccaaagggtgcctgcttccctctacctacccggctggtgaaccaggcttcagcatccttccggttctgctcggccatgacctcatattggcttcgcatgtcactcaggatcttggcgagatcggtgcccggagcggaatccacctccacactgacctggcctcccacttggcccctcagcgtactgatttcctgtaaagatacagcagagatgggcatgtcagggcccagaccccactgggcctggcccaggtcacttccccacccttcaggctaaaggggcttagttttcaggtgcaggcctagtaactagcactgggggacagactgggtcatcactgattcctcttggaaccctgggatccatgatcccacacccagggccatggtgagggtgcaccaagtgttaccacggtcagagaatacagaataaaagagtcttcagccctgggaggttagggaaggatggaagaaaggcccagcttcaaacccacctcctcatggttcttcttcaggtaggccagctcttccttcaggccttcgatctgcatctccaggtcggtcctggccagggtcagctcatccagcaccctgcgcaggccgttgatgtcggcctccacgctcatgcgcagagcctgttccgtctcaaacctttcaaaggaaatagttgcagccaggcagagcttcctcagcatctctgaagacttccctacctccccagagttcaggagtccataggggggttagcttcaggccatctaggctaggtgagggcagattctaaaccccccaacccctaccccagtcctggcttctgcagcccccaggacagagacactcacttggttcggaagtcatctgcagccagacgggcattgtcgatctgcaggacaatcctggagttctcaatggtggcaccaagaatctggaaggcagaggcagaggttggtaccagttcaacacacaggcactgcccactcactttcttcccagaagagagaggggagcaaatgaatataccccggcaccctagagaccaaagccctagccagcatctgccgcccattggcccgctctctgggaggccttgcaaacagtccatgcccagaagctggggcaggaagaaaactggagccagggggacttgggtgggggagggcaggaaggcaagcctggggaggaaatctctgagacctgtgtgcaatgaaactctaaatggcctgaagggggtctataaaccagatggggggtagattttgtctatacctgccccccccactatgcgaagcatattttgcccccagggaagagaatcccatttgttgagtatcaattatgtgccaggcactttgaatctcatcttttatagcttctggaacctcactgctaggtcagtgggtactcctatcttacagaggtggaaactaaagtttaggatgatgcctcatccaagttcaccccaacctgaggtcttactgacctaagaggcgcattcacaacagccagcttatcattgaataaggtaattgtgttctgtttttcaaagagcaggtcatcactcattagtcaaggcaccaggtggtgattgtatagttttgtgttttgggggggttttttggttttgttttttggggtttttttgagacagagtctcgctctgtcacccaggctggagtgcagcgtcgcgatctcggctcactgcaagccccgcctcccgggttcacgccattctcctgcctcagcctcctgagtagctgggactacaggcgccctccaccacgcccagctaatttttttttgtatttttagtagagacggggtttcaccgtgttagccaggatggtctggatctcctgacctcgtgatccgcccgcctccgcctcccaaagtgctgggattacaggcatgagccaccgcgcccggccgattgtgtagttttttaatgcaacagaataggctacaaaatatcagaggggatttctcttagtatggtgagaattgtgtcacccatttgtgtgtgtgcatgtgcacgcacacacacacacagaggtgagaaaaagaatgcgtaagggtgcgtagtaaaatgtacttattgtcgcaatttttttttttttttgatacagggtctcgctgtgttgccccaggctggagtgcagtggcactgatcacgtacagctcgctgcaaggcacacgccaccatgccaagctaattcctttttttttttttttttttttttttttgagacggactctcgctctgtggccgagactgaagtgcaatggcgcaatctcggctcactgcagcctccgcctcttgggttccagcaattctcctgcctcagcctcccaggtagctgggattacaggcatgcaccaccacgcccagctaatttttgtatttttagtagagacaggattttaccatgtttgccaggctgatctcgaactcctggggctcaagcaatcctcccaccttggccacccaaagtgctggggttacaggcgtgagccacagtgcccagcccctgtaggtcacaattttacaagtgtgtaaagcactgtttttgttggctgttgacatctctagcgcttcctcctggtctgtgggtctgggtctatgccacgagtacagcactggaaaatattttggggatctgtttgttgggagacccagcgtgtgcggctgtaaatgttccatggcttctgatacatttctttacgactcgaaaaatttctccttccctctgggtggagaccaagccctacccctcaggccccttagggttcccctgtaagagcgtgtgacgcagatccgttctttccccgacaaggagctgccactgtactgggtcctccccagcagaggtttaccaagcctccctcctttaccccgcccaggggccacgaccggctctcccattcttcctaaacgaatgggccccagggcgggagagtgggaggaggccaaagcctgagagggatgaacactagacccttccggccagagaaacggaatgcaggaggccctacgctgcggtggcagagggggcaagactggccccgggtggaccagatcaccaaagccaaactctcgcatcttcctgcggcagcgcggcccctggcctagacctctgggcactctacagccgggtcccatctcctcccactcttcaggcctcgctgacccgcgtcccttcttcgtcccggggctccaaccttgcccccgccacctccagaggccccacccacttatctgccctgcccagttctcctcccctttccaccaccccggcctctgcatccagccccgaggtcctgccccgcacgtctcctgtccccctttactcggccccacctgtggaccttcccacgtcctaacgggctcctgcccgccgccccgcctggaacctcgcccggcccgcggggctgggtttccgcggcaggtgcactgcacttcccgcggccgggcctccgcccaccttgtcccgcaggtcctggatggtcgtgtagtagtggctgtagtcgcgggagggcccaggcccctgcttctggtaccagtcgcggatcttcacctctagctcgccgttggccgcctccagggcgcgcaccttgtccaggtaggaggccaggcggtcgttgaggttctgcatggttagcttctcgttgcccgccagcagcccgtcggacgcggtcaggacgccgccgtagccgccgccgtaggcccccgaggaggacgaggacacaaagcgggcggaggacacggatacgccgcggccgccggagcccccgtgaatgctgggcgcgcgaaaggcgacccccggcccaaaacgcacggagccgccgcccaggcctccgaaggacgacgtggccgacgactggcgatagctgtaggaagtcatggcgaggcggagcacggacggagcaaccctggtctcagaagctgcgattcgcgggaggagcggcgaggccctcacctggcgccttttatgcccgcggccggtggaggggggaagggaggaatggtgtcaggggcggatatctgagccctgaggaatttgcaggctcctgagagcaaatatgggctctctccccattggtcaattccctcccctcccagagaccagaggcccctgccctccagaggtgccccgccccggtccgcgcagaagctccgacccgcactcccccactctctctctgcagaccctgttctggcctttcccccgtcagggacatacctggacacccctgtccctggaagccacattctgagcctcaccctttaagatcacccagagtttgacaccactgggaattacagtccctctggggtcatattcctacacacccctgacccagtgattttgtttttgtttttttggagacgagtctctgtcgcccagactggagtgcagtggtgtgatctcggcccactgcagcctccatctcccgggttcaagcgattctcctgcctcagcctccggagtagctgggattacaggcacgcgccaccacgcccagctaatttttgtatttttagtagagacagggtttcaccatgttgaccaggctggtctcaaactcctgacctcaagtgatccacccgcctgggccgcccaaagtgctgggattacaggcgtgagcccctgcgcccagccccagtgattaaccattcagagtgctccctgttaagagccccttgcttgcgatcctaaccagcccgccccccacaaagtgcattcacagattcctgccctccactggagattacagcctctcagaaccagcttcttgggaacacccatgcccaactccccttttgtcccctctgacaaaggcaccagttccggatcagggcacatccgggcattttgagctgcacgaacccagccctctcaagacaaagctgcctcaccctgctgtcgccattcagtgccccaggtgacaacagtctcctgagaacagctgcagggagcggttctggcagctgacacctttccaacactaagctccagcctgatcctcactctggaaccctcaaagcccactcgtccctggccaccaggatgatcccctcccttccatcccccaaagcatgcgttcattcaaccacaggagtattgggctgctttaatatttccaaaatgaggaagcagagcctgggagaggccagtaacttgcccatgaggcatttagcatctgccactgaaaggcaaacataggatgaatccctgccctccttgtcagagggctgctgaatgcatgtcctcatccttgtataaagatgagtgcttgaatgagctgggcagagcgacacaaagtgcccggcacaaggtaaaggttttgacaatagaggcagggccttcctccccacacagccccaccccttgctctgttcaacaattccacccaccgttttggatctctttggagggccatgccccctgccaggcactacagggcgctgcaacaacctcaccccagttcctgtccccagtgacccccgtccccagaactgtccccatggttccttcttgtccttatggcaaagcattcacccaggcttggaacagaggccctcctgagaaggtattaagggagacaggccagtccctgcccatctctgggtctcagttttccctcatgaaaagaggggtggcccagctcagccctcttctctgtgtattatcacctgggtcacctgtgactggtggagacttgtctccagcctcggaaacctaagttcccagcaaactacctgttagctgccaactcatccttgaactggggcaggaaaccccgtaaatacacacccctaacccaccaggaaccgctctgagccctcaggaaggccagtctgaggctgtttaactagtgaatcagttgcagaaagactgaaggtctttggagagcccaagagggagaaaggggagtccaagaccagccataaaagccagcaccctgtgactggtcagctctgagtcattcccttatcaggcactgatgaggaggcctgctccttgttagcgggaagggagattggccagatagttgccatgcacacaaagccccaataggcagctctgtttttctggcctgataggggggtctggggagggactttgtattaaagggcaaagaatagaatcaacagttccattcgtaagattaaggtgttctgagctccctaaccttcagaggcacttggagtcccagccccctactctaagaccataaacagaaggacagttgactacagggtagcacagtttagagccttttcagatctcactggatcctcacagcagcccagtggaaaaggtattcttatctccattttacagataaggaaacagaggcttggtgagaggcagtaatttgccaaaggtccaccgctaggagtatcagattctggcctccagcttcttgaccatcagccaagagtaacggaggccctgctctcccttccaaggaagtctcggcccccaaaacaactcctttgggtgccttccctcaaaatcttatcatgccagtgccaagggcagtcaaccccagactgaactgttggctgggctagggagaataccttgttccctctctctggccagaaacagtgcctggccatgaggtatgtggcctttggcactttctgattcatcaaggactcaggagaacagtctgtagaggctgccctacccagagatggaactggaggtcaagctgctgctcccatttaggaaacagtgctcacaaccaggaggctcccatcagcctctggcttcaggagggcagaacctggtcagaggagcatccatccaatgttcatgtctccagtctcaggtctggggtctgcagaagaggggtacagagggtcagaagtgatgggtatggaatggtgagctcaaaggaatcccagggaggatcctgcccagccttccccaactggattctacagaaccccagcactatgagatccctgcaggaaaaaagatccctgtcaaataagatcggaaactctgctctctctgactctcttttggagtttcacaaggcacagtaccagaagccctggaaacctcatttcctcatttgtaaaatagagatgatgatgatgaggaggaggaggaggatacctatttcagagggttgcttcaagtgataaatgtaatggtgcttgtaaaaggtttatcacacctggcaaatagcactcaaacagcattattattattattatataatgttatttttatatagtatttgttactataattttggctacaagtgttattatttaactttctttaaccagtatttcccaagtgcactggaccatggaatctttaaatatctattaataacccatgaattacagaaaaagccagtccagccccaggatgctcagaaaggtaaagtgactttcctggggtcgcatgatgattcaaccgactgaactgaggcagatctgggattcatttctaactcctaacactgaggctgaggccccctctgcctctccacttggacatacacatgaagcttcttatccttcagcagatgcaggtggttcccagagtggagaggttaaaggtaggggggttttcatcatcccaggagaaatgggatagtcattggagaccacaggaaagaagctgggggtgagagacctagtccttggatagaatggaatggtgtgataatgacaacaagaataatgatgaccaaggtgataataatacagtagataatcatagccaacatctactgggccaggctccatgctaaacactctgaatatattatctcaatgaatcatgttaattaagtattattgtccccatttaacagtcaagaaaattgaggctcaaaacggttaatatcttgtccaaggtcacacaagtaagtagtggactgggtatttgggccaaaatctttcactccctcaagccacagtcccaattgctaatgctgccctcctctcatgggaaagggatcaaggtgccttcttctgctgccctggagaaagagccaccaagttggggaaggcattgtatcatctgccaagatcccaacttgccctgcctgctctgatgcacaattatttgtttggtcagtcagtgggccattcaagcaagtttcctccaagttgagcctagcagaggagacagactcgtgtccatgagcaaagcagaaggctctgttcataatctggaggagaggaaaggtaaatgtgtggaaaacttcatgagcttgcatgtcctgtcaattagtagctccttacctgaacggcctccgcttccccagggaccaccagcacaaggaacttcctcacccgctcctccattcattcagtgaacatgcatcaagcgcagcttctgtgctacgcatgctgccaggggctggggcacagaagtaaatacaaatatttcctgcctctaagaggctgacaatctggtaggggggtgtatagaagtgtattagctttggtgaaatgtggtaggttcaatagctacatcaattttgactccttcctaaaaccctgctatgatatgacagttaaggagtattttaagagaatggaagaagaggtgaggcacagtggcacacgcctgtaatcccagcgctttggaaggccgaggcgggcagactgcttgagctcaagagtttgagactggcctagggaacatggcgaactcctgtctctaccaaaaatgcaaacaattagctgggcatggttgtgtgcacctgtagtaccagctacacaggacgctggggtgagaggatcacctgagcttgggaggtggaggctgtagtgagccaagattgcgtcactgcactccagcctgggtgacagagtaagacccagctggaagggaggaagaaaggaaggaaggaaggaaggaagggagggagggagggagggagggagggaggaagggagggaaggaggaggggagggaaagaaggagggaaggaggaaaggaaggagggagggtcaaagatgagaaatgtcaacaaaagctttaaagctcaaaaatggtaacacagaagatgagagaaagctgagacccagggtttgggggattaggaaggggtcaacagaggagagagcaggaagcccgtgagaggcaagcacattctcaacatactctaaagaagctcaagaattggggcaccacagacatggagaggaaaagtggaagagggaccgtaagcagggctggctggaagtttctgtcaacagtaccaggccccctcccagacccctacccaactaaggcagccaggggaccacctctccccaattcaggagaagacaggagatttacttttcctgattagactggcctgctcacaacgtttgatgatgtcaagtgtagagaagccatgagtaaatgaacctcctcaaacacattggtgggaggtgggttgtagtaaccactttgcagagcgatttgacaatgtcatcattttttttaacattcatgcacttcttgagccatcagttccactcttcgtgttcatccgaaagaaaccctggcccgtgtattgaggaagtcatataaaaggatgccctatgcagcattgtttgctacagtgcaaagacacaaacaatcactaatggcggggaggcgttcagtaactatgtaacatcctgctgtggaggactagaaattaaatggaatgagtaatgacaatgaatagtgacactgaaaaccctaaagaactagttattgggccggacatggtggctcacgcctgtaatcccagcactttgggaggccaaggtgggtggatcacctgaggtcaggagttcgagaccaccctggccaacatggtgaaaccccgtctccactaaaagtacaaaaattagccagtcgtggcggcgggtgcctgtaatctcagctactcgggaggctaaggcaggagaattgcttgaacccgggaggcagagcttgcagtgagctgagatcgagccattacactccagcctgggtgacaagagtgaaactccatctcaaaagaaaaaaaaaaaaaaactagttgttgggtacagtaaatctagttggagagcaacacacttaatatgataaattcatgtcaacatacattcaaaagatgacttattgctaaggtccatatgaatatgtatgaatatatgcataggtaaggaaggaatctgattgaaggatggtagccaataggaacctaagcttaatctctatggttttaagttttataagaatgtatttagtatttcttgttaattaaagtaaataatttcttaagtaacactaaaccacagacatttagaactagccaaatttcatatagtcaataccctcttcccctccctgcactcaccactgacatcattgtctctgctcatccacaccaaccctagccttgaattgagaaatgagagaggaagttttggaagagggagaactagatgtgaggagaaaagagaccctggaaagggtttccatcctcgtgcccccacccctgggtccgccaggctagttttacttctttatgaaacaagaaggcaaaacggacaagaagaactttggaagagtctgagtacagggagagctccttgcagccgatgacttacacctgaggaaagccctcccactctggttctccaaggatccatcgtctggaagcatctgaagttggcccccctgggtgttctcacaacagacaacaaggctctcccaggtggtggcgtggatctgtggggctacagctggtggcagagcagagggtattctatgcaagacagcagccaccttgtgggcacatgcgaggcattcccctggggactttctgaaataactggaagatctttagggggtgctggagtgggagccaccatgtgggccatcaggctagagctattgacccagtattgaggtatgcctcaaaccaatcaatgtgatcaagtatgtagacactgggaattatgtctgcctgggggcattgagagctatttaattacagaggcatgacccttgagcaagaagctgacagaccagtaggtatttctcaggcagaagagtaaagagaatgggggcctggaagagatgagtaaccgggcccagcttgggagactactggcaattcaatatggttgggccatggcaggaggggagggaagggggtcgttgaggacaaggtcagctgtgggggagctgtaagcaagacaatggaaagtcattttcatcagggatgggatgtgggttttgtgtggcaaatgggttgatgtgtcaagggaagcagggatgaccagggataaagaacccagtttagggtgttttaaaatagtccatgctagagatgagagggtctgaatctagccatagtggtgggctagagagtaaaggacagagacaagacctgctgttatgacctgatgacaaatgggagtgatgaaagagagggaccctgcacaaagcactgctgtgtgccagagatgctggccaagtcctggacggtctcagctgagcaagatccctgccactaccatcccccagccctgggacccatgccgtctcttggggagccttgctcttgcccagatggggaagaatcctattcactgtcttgaagggcccagcagccaggacagggcagcgccggccatgtcatgagcagcccaaagccgcactcgggtcaggaggctgatgctctcgggacttgagcctccgcacagcccaggtctggccatttctgctgcatctcaatggcttcctgagacgtggaaacccaggaaagggggagggcagggcaagtaagctaggtcaggatggcccctggtgttcctctccaagtcctcaggggaggaaaaaccagcccgaccagaaccagggcagatggtgtgggtggggagggacagctgagtcctgcaaggaatagtcccaggtccaggggccagcttccccgaggtgccacattccacagcctgggaagacaggggcctgcctcctcctcactccctctccctggaggtgagtacgtgagcaggctcacgctcactccacacagggaggcccccccaccgatcttagccaggggtgtctctctcagcttttgtcctgccctactcaatttgggcctcatttgacgcctctgccccacttcaagctgtggcccattccatctggactggggcaaggagagtgccagacacaggacagagagaaagaaaatgtccgggtgcctgcccggattcccagcacccaggagagggcacctgggtgcttccctgctgccttctggctgacaaacttccctcccatcaggatcctggtgggctgtggtggcgatgctgcctccttcaagaacagactctgggcagtcccagatgagcaagacccctccacaggcaaaatctttcctttcaaaacccatctgatcccacgactcctgaggggaagcttcagctctgtactccccctcacctgggaaggttcccgtccagaaactcaaattgtcctcctcggatgcaggggtcttggacactgcaagcattttcactgaacacccgctgtatgctggaggccacctccacccggcgttggccagagcatcctccctgcctacctgccccctccctttacctggatggcagccatgccagctcctctcagttccattggcatgggtttcttctccctgatatgtccaccctgacccgctcaggctgggtcagcattcccacccccacccacttgcccagcacttaccacagctctgtctccccatctagacttggagcttctgtatctagccccagggctgactccagcactagtaaacatttaatgattatttgccagaacagagccttctcctgaagcccttttattttttttcatttaacaccaattatggtccaccttctgtgtgccaggcaccttctagactctgggcttcaagagcagggcagtctaaagctgcctgccctcctggggctttcatctggggtagggggcagagtagcaaagccagggagggggtcagcagggaaggccattgaggggtggtcagggaaggcctctctgaggaggtgacacatgaacagagacctgaatgaggcaaaggagccctcagatccccagggaagattattccaagccaagggcacagcaaagccaaaatccctaaggaagagggagcttggtctgttcaggcaacaccaagaagtcccagtggttaagaggggtgagccagaatgacagtgtgcaggagatgagcccaggggaggccaggacagagcactcggtgtctgcggtctaatggaggcgctggcttttatcttgagagtaatggtgctttgagcagaggagcactgggacgccctccccacccctggctgctccctgtggaatagaccgtggggcccaaagagctggagatctaataagaggctctaatggagttcaggtgagagacactgggggcttgttctggggagacatcagaggacttcaggaacagtggcctggtgcaagggatatcccgagggcagagccagcaggtcaggctgacgattcatggggaggacaagggaaggagagaatcttgcatggctcctggttgaggtgtgagcctcctatttgcactgaggtcaggaagctggtctgggacggtggtttatctaatccacctccaggaaaggaatcacaccggggccctcctagatctgtgttggaacgcgtcctggcagaattaggttctactaaccaagcaatgactgtaccccgatctctgccagcgctgatgcctgctgagggaggggaaggacaagggctgtgtccacctgggccctgccttcacagacggagcccacagttaggggttggtatgaaagaggcgactttcttttttttttttttttttttcttttttttttttgagacagagtcttactccatcacccaagctggaatgcagtggcgcaatcttggctcagtgcaacttctgcctcttgggttcaagtgattctcctgcctcagcctcctgaatagctgggattacaggtgcctgccatcacacctggctaatttttatattgttagtagaggcagcgtttcaccatgttggccaggctggtctcaaactcctgacctcaagtgatccacccacctcagccttccaaactgctgggattactggcgtgagccactgcgcccagccaagagacagatgatttctaatgaagatctgtgttttctacattttcaaaaaagcagcagtgagcatgtctcacctctagcatgggttgaggggagtgcttattattttcaattctgactcattccaggctccactggctttaggctggcaagcggggccttgcagacttgggggaggggtggtcaggttagtgagtttctggaccaggtgagcagggggttggggcagaaggggcattcctaacagcagctggaaggagcttcagagctgctctggagacaggatgctgaggccctgctcatcccggctccaaccggctgcaggataaacattcatcaggcagaaaccacagagaatcacatagcgagatgggctgccaggagctgggaataccaggaatgcccaggcctggggactaagggggagatgagggagaacgggggagatcccctttgccccaaggaagagcagctgacgcctgatcccatgagaggggcctggtatctgaagcgctttttgaagtcagttgaaaaggaacactatcccacctcaaagacacacacacagagtattaacagaagacaaagcctcaccggctcccttaggcatctcacgtgcattccaggcaggaactacccagtgccagcatcagccctcagcaggctgcccaattaccagcccaaggcctaccagccgtgccagcaccagggaggcacgggggatgcaccaaggaaccacagtgccaggaagcatcttctgccctcccctggctcagtcctgccaagacccttccccctccagtggaatgtgctggagttggagaggaaagtgcttcctccaaagtccttgcctgggattagggctggagcctgtggggatgagaagatccaccagagatatctgtcctcgctgagtaaacatacaatgaggacctggtacacagaaaccgaacaaacacatcccaacagggatatccatgtctggggcttcagaagaaagggctggagcatggggagaagagaggaggcttcacgaaccccaagtttcccattcctgccatgtccatgttacctcatccttatcctcaccttgactgctaagaaacatagtaagcatcttcttggccgtgcacagtggctcacacctgtaatcccagcactttgggaggccaaggcaggtggatcacctgaggtcgggagttcaagaccagcctgaccaacatggcgaaaccccatctctactaaaactacaaaaattagctgggcatggtggtgagtgcctgtaatcccagctactagggaggctgaggcaggaagaattgcttgagcctgggaagcagagcttgcagtgagccgagatagagccactgcactccagcctgggcaacagagcaagactctgtctcaaaaaaaaaaagaaaaagaaaaagaaacataataagcatctaaaagcccagcaagatgatttagacaaaactcctacacttgtaggatgggggcatagaaatcttctagcccagagatcttcaagcctcgcctgctaagccctaagcagagaggtgggagctgagcggatctgctgtgaccacccacactcacacacacttacacacctcacacagtattcacacctactcacacatgcacacacatgcatacacatgctcacacatacactcacacactcccaggccttctcacacatgcattcacactggttttatatactcagctttctgtgagattttgcttcagcaaagattctccctcttttaaagcccaaacacgtgcttcagcctacctccagcagtttatataggtcagaaaactgagagagagtggggcctcagcctgcctaaagtcccacagctggtgtcctgctcagcagaaaccagcaggcaggtgccctggagccaggatgtctgtccccaggggacgacctgagctcggggaagagaaagaggtaaacactgtaggctcctgacaaaggcaggaggcaggccagggtcagaggagggacatagacccggggctgctggagctcagatggagggcaccctgagtgagggatcaaggcctgggtaagcagggagggcgccctggaggagggggcccttcacagccccagggtgagccacagtaaatggtgcctagagtaaggacatggaggtggcggatagtgggaagttccagtaaaaaagaaatcttataaaaacaggctaaatgtattggcctcttcctctatgcctaactctgttcgagtatgtggcatccatgaacttgtttaaatcatcgaagctcccctatgctgtggacactgtcatcactcccattttgccaactaggaaactgagagctacttgcttaagctgagtttggtaaggcaccgggctgggatttgaactcacaaggtctgggcctgcaccttgcggtctaaccactgtgtcaaaggaaaaccagggagcagaggctgcagagctggttcgaatcagacaacaaagggcctagcaggtcaagccactagatttgattttttatttttttcctgcagaagccaacagtgattgtttgagccaggagatgatacatgcaaagtaccaggtgagtcagacagcaggtttcctgaggctggaaacacagggctatcacccagctgggtcaacagccctgtcccagcaccccctcactccttccctctgctgccccaccatcatcgccttatcacctcaagaccaaaggaccacagccgcctcccccagagctgacctaccccggcaactcaccccagcaccaggctcatctgtctcaagccagctttgatcaaatccctgctcacaaattctcacagtcagcctgttctttacagcagcaactcgccatgtggtccttccacccccaggacagaacccatggagaggcgagccagggttactgaatcgagtctttgtggatgaacctgcacctttaataagtctgaatttttaataagttctccaggtgattctgaggctcactatagtgtgagaaccactagcctaacgcatgagatccatgagatatgggagaggcacaaagatggagggccccctgagtgagggagcgaggcccgggtaagctgaaagtgggtaagctgaaagcaagataaagtggctgaaagaagcctagccgtgggccgtttacctgctaacagaggaagtccacgttagcataactaaaaagtaacacacctagttttctgctttctgtctgggtgaccctgggcacaggtgatcaaagcctcacttggcacagctgccaaattgccaagaactgtaaaggtctaaaattttactctttttgcaagttaaaaagttgtcctgccatagttttatggatgctggcagaagacacgagaccctgggtcagagacaacgactttattactcatggcacagcaagaaacttgagctttatgttgcaaagagctgtgggttcaaatcccagctctgtgccttactaaactaagcttaagcaagtagccctccaccccaagtaccatgaggacaacacaaagcttgactcgagtggatgctacactacatatacaatgggttttgtatcacagctgaggagttccacacttgggggaaccaaattttttataatgggctgcaagaaaacctgtttgatctttgctccagagagaaatattgttattattatacagaacagtaaaaaaaaaaaaaaaaaaagctgcctcttttccagaggaagatgtcatctctgtcttccaaggaagtttactagcacatccttgaaaaggcagaccagaacaaaagctgtcagtgcctctgattgcaagatgtgcagaaatacaagagatccacagacaattgcctccccaaacaaatgggtgtatcaatattcatctctcttgaaggtaacaagttttaaatcagataatgtgagagaaagttcgtggaaaaatgaggacaattacaatataaggagataagaacatggaggcaaataactagagtgaaagtggaaagtaataaactgggaacctcttgcaacacaatttatggagacaataaagcaggaagatattctcaacccttatcaccgacccaaggttaatatctttaatatatataaagggctcctacaaataactaagtaagaaaccaagaaccctgcaggaaaaagggcaaagaatatgagcaaacagttcccagaaaaggagctacaagttgcatttagacttatgaaaacgttcaaccttacttgagaagagaaatgcaaatttagagtaccatgaaatcccatgatttacatgtcagattggtaaagataaaaaggtttgctggccgggcgctgtggctcacgcctgtaatcccagcacttcaggagaccaaggtgggcggatcaagaggtcaagagctcgagaccatcctggctaacagggtgaaaccctgtctctactaaaaatacaagaaataagccaggcgtggtggtgggtgcctgtagtcccagctacttgggaagctgaggcaggagaatggcgggaactcaggaggcggagcttgcagtaagccgagatggcaccactgcactccagcctgggtgacagagcaagactctgtctcaaaataaaataaagtaaaaaggtttgctaaattactatttgttgggaatatggggaactggacacaccacacattgctggtagtataaggtctatgaacagtcatttccaatatgtatcaaaatcttaagccaggtatggtggcatgcacctgtagtcccagctactcaggaggctgaggtgggaagattgcttgagtccaggagttcaaggctgcagttagctgagattgtgccactgcactccagcctgggaaacagagcaagaccctgtctcaaaaaaaaattttttttaatataattctttgacctatcaatttctttcacaggtgtttatctttcagacgtacttctgcacatgtgccaaatgacatgaagtactaggaggctcactgcagtattatttataatagcaaaagaccagaaatgcctaaatgttcattatatgatacatacaataaatacatatgataagtatgcaatagaatactgtgccaccatcaaaaagaatgagtcagctctgtatagtattgataggaaagatgttcaaagtattttattaaatgaaaatgtaagatggtacagtaatatagacagtttgctattatttttatgtgtgtgccagggaagaagatatgcacatctatgttggtaaatgcattgggttctttagaaggatacacaagcaagtgagatagcaggggatgcttctgggaacggagctgggagactgaattcaaagaacggagagactaatgttttgctgaatatcctttgtacttttaaaattttgtactgaattatatatctatcacttcttcccaaatatatatatatttatactgaattttgcatgtatttcttcttccaaaatgtatatatatataatgcatgtactacttcttcccaaatatatttatatatatataatatataatgcagaattatatattatatataatacataatatatataacatgtaataattatgtattacacattatataatatattacatgtaataattatgtattacacattatataatatatattacatatatttggaaagaatacatgcattatatatatatttgggaagaaataatacatgcataattcagtacaaaattatatatctgtaaaaaaacaaaacctaacttgggcattcagatctgccaagaagtttgaggtggtgctgggaccccaggcctgggccctgcaggagctcacagcctcagcctctctggatctactggctgccgatgggcactctgagcagtttcttgcttttcccaaagccatgcccaggaaacaccattcattccctcattcactcgtgtgctgtgcgtgggctctgagccaggccctatgccacatgcagaattcagagacgaaacagactcaggcccagcccccaacaagctcccagcagatgggagaggggagaatgggggagggaaagatctacacaaatagctacaaaagagaggcccagcagtatagcgtagcaggcaagattaatcagtgaccatgtagcaaggcagtgacaggcctggcctttgaaaagagccacgccttggggtgagagccactcattagccaggcccaggtattcacctccctaagctccagtttcctcccctataaaacatggaccataatcacaccagtgtggcatgtggtttagagcccaggccttggagccagggtggcctgggtttgattcacagagccaccattttatttcaaagccatgtcatgcaacggccgttacctcacctgtcagaacctcagtgtccccgcctctgaaatgaggctaataacaccaacctcagagggcttgtgggggaataaatgaaaaatcaggtgtgaagcacagtatctggcactccataaaatcaagagctattaccagcaacatgaaggttaaatggcatgtgtcagtcatcaccgcaggggacaaccactcagcaggtgtgggctgggaggagctttctgttctgttttttgggttttttgtttgttgagatggggtcttgctctgtcacccagggtagagtgcagtggcgcaatcctagctcattgcagcctcaaactcctgggctcaagtgatcctcctgcctcagcctcctcagtagctagggctacaaacatgcactaccatgcctgggccaattttttttttaagagacctgttcttgctatgttgcccaggctggtcttgaactcctgggcttaagcaatctgcctgcctcggcctcccaaagtgctgaggttacaggtatgagccaccatacctggccaggtatgggtttttataaaagattttgtgagaggataggcacagtggctcacacctataatctcagcactttgggaggtcgaggcaggtagactgcttgagtccaagagttcaagatcagcctaggtaacatctctacaaaaaatgatcagggcatggtggtatgtgcctgtagttccagctactcgggaggctgaggtggaaggattacctgagcccaggaggttgaggctgcagtgagccatgatcacaccactgcactccagcctgggtgacagagtgagaccttgtctcaaaaaaaaaaaaaaagatttttgtgggagtcgctcactgctccctgtgcggtggggtggagggaaggggaaagtgttcttccaaaaagctgagatttgaagaatgaggagtgggaagaaaagggctcgggtggtgggtgtttctggcacagggaaagctgtgggaaatggcctggccaggtgagacaatgcggggagttcagggagggagcagttcagtgtgttggaggcgtaacactgggagagttggaggcctggaggctggggaaggcaggggaggggacaagtgctgcctgcgggcctgttggcagtgggggtgtgggtggataagagacgggccaatggagggcctcacggaggggacaactgcgagggtccgactcaccatgcaggtcctgaataaagccgtgctgggcctggagaagtgtgggtcggggagggatggacactgaacagcaaggctcacctcacatccaggaggccccccgccagccccgccatgccacaggcactgacggttgccactaagcctcagaggccaactgcatttatttggaaatggagcaaggcactggccatgtccaggctggctttccagccctgtcccccaaaatcacagtcttcctgcaattactcacaggtgctggccaatagtgcttaggttctcaaatgcctgcttctactcaggctatcctatccacctgcagggtccttcccctcagccgtcacaggttgaaactgtgcctcttcaccattgcctggagtagacagaataatggccctccaaagatacgccaatcggaacctgtgagcatgtaccttccatggcagaaagagactttgcagatgtgattacattaaggatcttggaatgggggttgggttatcctggattatccgattgagtccaaagtaatcacaagggtccttgtaagagagaggcgagatggtcaaggtcacagagaggagctgggaccatggaagcagaggtcaaagtgaggcactttgaaggaggaagatcccacaagccaaggaaggcaggcagcccctggaggctggaagaggccaggagacagactctcccgtagagcccctagaaaaaaagcatttctgatgacaccttgattttagcccataaggcccatttcagatttctgacttccaggcctagaagatagtaagtttgtgttgttttaagccactgagtttgccaccacttgttacagcagcaacgtggaactcatacatcacctcttccttcaggcctttgtgatccctggcactcgctcttcctcctctgagcccctctggtgctttacctgaccctctcccaggcactgtcctcttcctatatgggtgagaattcattggctcttatcccctctaccagccagtgagctccttgaggctggggtctggctcatatttgtgcccccttgcccaaccactggttgggctgataattctccctggatccttagatctactctccaccttcctctgtcctgctctgtacctggaaggatgatccctgtgtcactggctcccttccctccaactgccccattggaatcagccatccatcagtaggcagcagcggaagatggagaacaggaagaaaggggcctgtgtatctatccccccacctctccttgcccagccacggttctggctgcagctgctcgctctaaggctcctgcagggcagccctcccctggccacaccccctcaaactcccttttcccatccctccgcttcccactgctctgctctgggctgtctgatccctgctgctcctgtccacacctccagaaatagttccctttctacactcggtcaaccctgagagtccgtcatattctgtggggcccctggtggatgcagatgtggctgatcatctacgtggacagccaggtgcaacacgcctggtagatgtgtgaacactgcttcggtctgtctgtcttagatgatggctggctgggaggggcactccccatccccagcacacaggcaggaagaagggcgttggcactgaccaggagaggctgtgagcaggacaaaaaagcagccagaccctcaccccgtctctccccacacagacccacatgctgacaggtcccaggacacatttctcctgcccaccctcacccctagggagctccgggcagcgcagaggctgggcaagtgggactggcagggtgccatgccttggtcccagagggctgcctcccttcctggtaggtctgtgcctggtgctgccaggcctggcccggcctccacactccttccccttcacaccacaatctgagctggcgagtgactcatcccaccatcctcctacgtgccccgtccctgactccaccaaacttggcctctcttggctccatctctgcactggctcacagcagcaaaagcatgtccacccccacgccctgcaccgcagactaaggcagctcactgcacctcaacgaggaagagccaggctctgacattcccagcttggatctccaaggaggtggctgtactgacacgtggacagagccccatggcccccacactgacacactggatcaggcaactctgctgtctcttgacatccatgatgtccactccttacaacaaccttccaagggttactgcccattttacagatgaggaaactgaggctcggggaggttacatgacatggcaggtggtagtggagctgactccaaaggctcctgccttcctctatagcatctccccctctaccctgagccaaactccgggaagccatgagttgtgtaggaaagggcttgggcactgacttggcggtccaaagccctgaggccaggctccgcctttcatcagctggctgacttcgggcaagccctcggcctctgtgaaactgttttccagtccataacaggaacagggatcctgccctgcccacctcaccgggcattcagaggctcagagagaagaagcagcgtctgcaaagtgaagtctggggaaggtggttgtggggtgcctcagcagcccgccaccggagcccggagagaggcggtgatgtccgctttggagccaacctcggctctggacagggcaggctgccggccacaaggccccgtctttgcaagctccccaggcggggtgcagcttcctttgtccctaggcggggtgcagcttcctttgtcctcagactgaacatctccctccgccaccggtgcgggaggagcccaggacctcgccaactcggcttcacagcgcctcctgggggccgcgaggggactcgccaacctgcctgcaggcgggctccctcctaccgcctccctctgcacccctgaccctgctcagtgctgtgtgagaggaacggtcagagggagcctgtctgggcaaaggcaggccccacactccaggctgctccctggcctccctacagcaacaaagggacgttgagctgagagcaatacaagagaaagagccctaggagggctggaagtccaaatgcctgcattctacctttgtggccctgggcatgtgtcttcccctctctgggccacaaaagagtggaggaggccacctctctaaggaaagagagctccccgcccagcgctaaaactgtggtttctctgacgctcaatttcctggcgtgtaacatggccacaaggggccgctgcagccacagctgtgaaggaaacagttcacaccgtgctatatcgttcatggatagttcatggggttttataggctcttgttcatttccataaagtcttccttggacttggcaaacttttcctctgaaaattccaaagtgtaaccaagaagggaaaggaagagaagagaaccaagagaagggaaaagaggattttatttggttcgtgtttggacctaagagaaaaccagaaagattgcccctgcggctgaggggagccacaatattggcgagagataggagaggcccctcagggagaagaaagcttggggaatgcagatctctctttaagattgatgactttcagtatcataaatcggtagagccagagagtcctcagccctcgccccattcctttatcagtcacgctcgcgcaagcactggcctctgcctctccttgcagaagtgacttgtttacatgttagtacagctagttcctgcctgactgaaccactgtcatctgagaattgagggtcaaagttggatcttcccagctcagaggagaagccttctctaaacaaaggaggggctcagctgggtaggttgttgcaaagagaactcacttcagagccaaggcagccaggccctgtcacttaaaagctatgtgaccttgtgcaagtcattgaacctgtctaagactcaggatactgagacagcaagaccttcctcaaattgccgaggtgagaattaatgaaatagtctgtctaacgtgcctgggacctaccagaagctcagccagtggagtcattaaattttgtctttattattagcaatacagttctcgtagcacacattgcaaaggatcgtgtacccagctcaggggcacaaggtgtgtgattgcgaggacatcagagaaaacaaggtgcgatgaactggcggtaggcatttgttgggacaatgacagggccctggcctgatcaagggaaggatcagggggagaaggagatactggggggctgggaggtggggatgaaggaggggcactgtccccacaactcctcatgctcggcttctgcagtcccgagtacagacccaagtctgtttctccttgtcccattctgcctaagggctggagcttctcagaaactctgacaggacatgtgtccatcttcagtggggaccctccccctcctagaagtcccccgtccagctggggaggacaggtcagggtgagggcagcagccacccagcagcctccatcagagatcatcagcatttcccaccatgaattcagcagcgcatctcgtggtcaaatccataggtgatttctgggttctgtagcctcctcttataaacttacaaagcactttaagcaaacaaaagctttggccaggtgcagtgacccacgcctgtagtcccagcaccttgggaggccaaggccaaaagctttgagaagtcctgcaaaaaaaaaaaaaaggtttggtttgtttatctccatgttttccactggatttgatcacaagagttttgtttggggttattttatattaattaacacccctgggaacatacactggaaaatccaggggcccaaagaactcaagatagggttccagttaagaactattatgttccagaccagcctggccaacatggtgaaaccccatatctactaaaaatacaaaaaattagccgtgtgtggtggcatgtgcctgtaatcccagctacttaggagactgaggtgggtggatcacctgaggtcaggagttcgagatcagcctggccaacatagtgaaacctcgtctctactaaaaatacaaaaaattagccaggtgtggtggcgggtgcctataatcccagctactcaggaggctgagacgggaggatcacttgaaccaggaggtcaaggctgcagtgagctgagatcgcaccactgcactctagcctgggtgacaaagcgagactccacctaaaatttaaaaaaaaaaaaaaaaactagtatgaagggaatgctctcaacgagcatcccctgccccaactttttgtacctcaaacatgactatttgctgtggattctgaatttgctttgtttcctttgtattttgcagttttccattagggctgacagaagttcctttgggaaaaccccagcatgtgttagtcatgccgaggggaatggagggaaggaactcgctttgttctcattttggcctgagaggagggagaacagtaggacccctggggcttgggggctggcatggcctgagatggatgtgagacccaggggcagagaaaatgctaagagctttttggaccatggattttccatgactcagaaagtcagtggagcccgccctccctggtgccctcgttccttcattgccactgcatttgttccacacactgaggagtctggtgaggaaactgaggcccagagacaagaaatacctgggacagagactcactgttcatgggtagctgcttgctttccaagaagacatttccagagctttcctgctcgtgggaggtgtctgtaattgttttagacagcatgaggtgaagagggtgggcttgcgggtcagacccactcagatcctttgtcagctgagttatgtcatttctctgagcctcagtttcccatctgggaagctgggggtagtgagaaataaggaagatgacttctgtacatgcttgccaccgtcccaggacagacgaggcccagctgccatacagaggaggtgacagcatggagcggggtcaggggtgcagaaggaggcgctaggaggaagggacaaatgaggatagaggctgttgtccatagagcacactccttggagggaggagggacccaactcagacacagctcactcaggtcaggggcaggagcctctgaggtgggtgggggggtgtgacgggctggtgggagctcgtaagcagggacatgcccctgccctggaggttactcagtggggctgggagtttcgcaggtggtgcttctcagtccagcgctgcttccgtgggttaggatgaagacccatcttcttgccttgtcctcctccacgaggggcttatccagaacaaaagctgttggcagttcctggccaacaggttctcctcctccactgcagggctagaaaaaggtgaaaacaaaagggacatgtgcttctctgtggctctcggggtacagttcagtctccccaccatgagcaagtcctccacgactgaccgcctactcccaccagcacctcgtcatccctcttcagcccctcctcaccctctgcacagtagccccaggaagttcaagttccagctcctccagtgggccactttcagtcacacctccaggccttcactgatgcagttccccctacccagaactgcccacccccaacacacacaaacacacacacacacacacacaaacacacatgcacaccacctccattgaatatcacctccaccaaatatcacctccaccaaatatcaaatatcaaatccaacatcttcctggtgtgttgacccaacactttctccaaagaatgttccctgcctcccaagactgtgttagttgtttctgctgtgtggcccagagtccctgggcttccccctaatggaatgcagcatactgtatggaggtggctgttacctgttggtctctccgacaagactctatgggggcagactctgcctgggtcactgtagtagccccagctactagccccatgcctggcacagagtaggccctcagtgattacccattgaatgaaggggtcaatgacaggcagagtctccacttggggctcccaatgagcagagaacttggggaagctaaccttcctccccacacacaccccacctttgaatctcaagcttgactcttatgggtttggtgttgattcacttccctgaggtttccctccatcttgacaaatgctccttctgacaaccccaacatgactgagtcatggtgagggcaagagatgaaaggaatcatgtttgagagtttggcctgagttcgggtgaggatggcatgtctctgaggctgagggtgctggtagcagcaaagacagactgagggattcccgggtgggaagaaagctcaggaatatcaaagccatcggaggacacatgagtgtcacacccagcatgtgggtgcagagccgtccttagggactgtctgtccttgcagggttattcacccaggacccctctgcacccacactctgcttctgatactcatgtgttctccgacagctttgatcttcctggggagagatcaaggtaactcttggagaaaattgaggccacagcgcaatcttaaaaagtgttaaaaattgttagaggccagataggtcgtgctaagagcaggaggtagggagccagatcaacactggtgtgggtgacttgggcaaggaacttttcttctctgagcctcagtttcctcatctgtaaatggaagcaacaagagcaacctcacacagttgtgagaaatcaacaaaatgacatatggaagcttcctggcccatgcctatcctaggaagcttccctagccaccatggccagctcaggagaccccatctgaaagtacagcccatccctctcatcaccgatggcactcactcagcactggcctgtctgcctgtctgcctctggcaccagactgtgagcccatgggggcagagaccttgtctgttctgctcacaattccatctattcccaatccctgccacagaataggcacccagtgaagatctgttgaatgaatgaatgaatgaatgaatgaatgaatgacttgaagaggggatgaaaatagacaggaactccaatacgagattttcaaaaacaggcaggtgaggacccaccaggccttacctctcctcacgatcttttaacttcttgtcgtactatttctcctgggttttattttgttgttgttgcatcatttcttgaactttctttctggtttcacaagaattccctcagacaatcccagtggatctcagtctagtaagaggaacagagaaaggaactgattttattcctgtttgggcctgagatggggagtgcttcagagcctgaagccaagaggctgcagcagcagcagcagcctccacaaccaagcaggacactccaaggggcggggactcgagatcaaagctctagagatttgggtagatatttgcggactgttagaatgatatgaataataatagagaccctcctctgtcatcctcctccctgcaccgtttgctcattcacccattccttcctttgacaagcacagacccagggccttctagggggaatctgagatcccaggaaagaatctacctgtgccaggtcactcgtcttattctcagctcttcatacagtcattgcttcccacgtaagccttttttctttcctttttttttcttttctttttctttttttttttttaatttagagacagtctcattctgttgccctggctggagtacagtggtatgatcatggttcacagcagcctcaaacttctgggctcaagtgatcctcccacctcagcctcccaagtaacccagtaattaggacaacaggtgcatgccaccatgcctgtccaatatttttttctttttttggtagatgcggggtcttgctctgttgcccaggctgatctcaaatttctggcttcaagtgatcctcctacctcagcctctcaaagtgctgggaatacagacatgagccgccacacccagcccacataaggtatttttgacaagcctctgcttatgggatttgctagcctctgtattcttttggggctcaataattgctcaaggccatagagaacaggaaacagagcaccagctttggagccaggccaaactggaattatatctttgcttgatcatttacaagctatgtgaccttggacaagttacttaacctctctaacttagaatttcctcatctataaaatgggcttcataatcccagtgtccttggatcagacttcctagattcagttcctgtctccactgcttaggagctgtgtgaccttttcagcaagtcatttaatctcgctaaaaatgtttcctcatgtgtaaaatgaaaacaaggacagcatcatgagattgctgtgaagattagatacagggtttattcccttatcttatataaaatgcttagcgaagtgcctggaacattattaagtgcgcaatcagtgttagtccttgctccttccttgtggacaattgttcttacacttagtcgcccagctcctttgtaaaggaattctccctctagtgtctgtgcctcctggctatagaagccagaaattagccttccagcctcccttgcagctggagcacagacacatgatcagtcacacacatcacagaagcctgtaagctgggagctaatgtcctaaaaaaggaggcacctggtggaatccatgctggaaggaataactgcagacctccagtttctagaagcagcagcgccacaagtttggtgatagcgccaagtggaatgggctactgaatctgcacctgcagatagtggcaagggtgggcttgctccgggctgtgctgccttcaaacctgttccctgcgagttcttcctggagagtctatggcttacctaacatcctttaacaaactggcttcagagtgtggcttctgatctttgcaggcaaaaaccctgatggctacagaatttagtaacaagtgtgattactggcatgagacttctaaaagatctccgtttgggtgtccaaaagacaatgtaaatttagcatgtctgaaactgactccccatctttcataccagccaacttccatcccacaactcctatcatccagttgctcagacaaaagactcagagacctccttgacttctttcttttacaatatgcagtccttcaagaactcctggcagtgctttcttcagatgatgctcagaatccagccacctctgaccgtcttcactctgagtgccaggggctcttcacctccctgcacactgggctctctgtttctgctcctagcctcgcagcctctcatcaagtggcctgtcactcctctgctcaaggcactgtgtgttaggatgatcatcagcactagctgctgtgcctggagtggtccccacacacgcttgactgcctccctcactccgtcaagttgatacagaagggctgggctcctggctaaaccctacccttaagcctggaacctcggccctaaaggaccccattttccccaaaaatgttacctttttggcctgcctgcccacatgctgtgcccataaaagacttcagctggcagagcaacacaagcggctgagcactgaggatataagcagctgagcggcgagcagaaaagcaactgagcatcggagactgtggatagatctggctaacttcagatggtgcagctttggagaggggccctgccggagacggtggggcttcagggaaagatcaccatcccatcacctttccatcctccctttccactgagagccacccaacacccagtaaagtattttgcattcgtcacctttcaaacagtttatgtgacctgattcttcttcctggacgccagacaagaacctgggtgccaagaaggcaggggctgccaccctgaacctccattgaactggttggtatttggccatcccctgacagcacagctgaaagaatagggacgctgctgcagggcccgaacagagcctgctcctgccagagaggagcaaccggctggttccagcgttcatttgctccggttcccacacttgctcacacactcactcccacaaggagtggccagcaacaggctgagtgaaacaaagtgctccttagctgggcgtgatggtgtgtgcctgtaatcccaacataagaaaccccatctctactaaaaatacaaaattagacgggcttggtggcccgtgcctgtaatcccagcgactcgggaggctgaggcaggagaatcacttgaacccgggagacggaggttgcagtgacctgaaatctcaccactgcactccagcctgggcaacagggcgagactcagtctcaaaaaaaaacaaaacaaaaacaaaaaacaaagtgctccagttcccgcccatgaagggcgtcagggcaactattccatcgcaaagtcattgcttatgttttaccttctcagtgaacccaaccttggccatcctatttaacattgctctcctccccaccctgccatagcactccaatctcccttgatattccctacttctttgcgcacttaccaccttcaagtatagtattatttatttctttattacatttgttgctcttgcccaacccttacctataatgcaagctctatagaggcagaaatctttgtctcttttgttcattgatatatcccaagcacctaggacagtgcctggcataaaaggagcttgatacatatttatccagtgaagtttgttgaatgaatgacatgagaatcactttggttatctggcctagatgggccagtgaaaatctggctatgattaaaatgagcttctagaagcccacagcatgtgaattaaattggagtgggcttgtttcttttaactgtactgaagagcttagagaaggagtaatacacttgaagttctaagttcctgattctgtagacagtcagaggaccagggactgtccacaattattctttaaaaatatctcatttcttgtagctacaatgctgaagtagttaataaactcaaaattgacttctccaagttgaaatcacaaccttgccaagtctcttatataaaagttagagcactgatcaggaaagagggacacccacagaattggaacaggaaggtattagagaatttaatagactccaaactccaaattatcttcacactctaccctaccacccttcattgctttcagaattataaataagccagatgccagcatacctgggggaagaggccaattacaaagacaaagcttagagaaaaagatttacacaccaggagaatttcaagctgctgctaacctgtatgagcagaaatgtgaagactgggattgggaatgaatttttgaaccagctcagttaatgtgcaagcattcaccagagactggaagttcagctactagcttaaatatctggaagtggatcagaatggttgctcagttggatgacagaaactgaactcaataaaggcttatttgaaataaagttatttctagaaaatcctttttgtaataaagaaaaaggaatctgactgcctagggagacaggaatgttggggtagaattattgcgtggaatccattcactcattcaccaactgtgagagcccagaagacactgtgcagactctggcttttaagaaatacgtggatcgggggaacacagcatctttgaaaaacacagttaacagttgttctctgaggatgtggatgaaatatgctgcagttgaattaggcctcctgatttgaatggagatgacatctcaggtacaacacggcaaaggtgaagagctggactaggataaaatctgtaggagtctgtgatggtgggtctctaggacaaaaatacatgagcagaccaccagtcagggttcagttttttggtttttggtttttggtttttggttttttgtttttgtttttttttttgagatggagtctcactctgtcgcccagactggagtgcaggggtgcaatctcagctcactgcaacctccgcgtcccaggttcaagcgattctcctgcctcagcctcccgagtagctgggattacaggcacccaccaccatgcccagctaatttttgaatttttagtagagatggggtttcaccatgttgaccagcctggtctcaaactcctgacctcaggtaatctgcccgccttggcctcctaaagtgtgggaatcatggacatgagccaccgtgcccggctagggttcagctttaagtaacagaaaccaatctcactttcttaacagaaataaatttaatacaaggcattaggtgcttgcaaaatcattagaaggctgaagaaacagactctatattgggcttctgggcatggcttccatattaacaccacagaagtggaccccaagggaactcttggtctgccacaatcagaaaacttgggaatcaggaagccactaccagacatgttggccccaggaccatacagtatacctggcagacctacacaaagaaaaagcatttaacttttccccctctacttctctctccactcaactcatgactcacagagtgcatctgattggaaaaacctaagctatggctgtaggggaatctggaaaagggtagattttagattaccagcctcttgagtataggaaagctcatcagaaggatgttgaaacagataggagtgagtcagtcttccatatctgccacattcactaccccgcccccacaaaagaaaactttaggtcagtaagagacctgtcttgagccccatgattccaattccaaaatcggaattggctcatagacccagagaactctgaatgaaggggaggctttgaggaagggccctgcagtaacatcacaagcatgcactatacgtccactgagagccaccctatgctcaataaaatcttctgcattcatcacctttcaaacagttcatgtgacctgattcttcctggacaccagacaagaacctgggtgtccagaaggcaggggttgccaccctgaccttcccataggaatctgtgggtatttacaagaatagctgactcctgagggaaggaaaatacccaggcctttagggatgattggacgctggctccaaaccaattctaatctctgaaaatgcagagcaatactgtggttccccagttagaatggaagctcatgtgagtgtaggttgtatctgtcatcttgtcactattcttttccagggagatctaaaaactacatttaccagcctcccttgccactaagatgagctgagcaatttaggttctactagtcagacgcacccatgtggacttggtttagaagggaagtaggtgaggaaatgaggttcacctgggacatccagcttactggtatggacagcagaagcagcgtggctctgcaactccagctgagtccagaattagtgcagaatggactcagaaggctccaatctgacttggtggtttcatggtcttggcagaggcaacaactcctttggcagatccactctgctttgtcatttggagggttctggaaaaatcaccctagattctgtttctccagccctcctaatgattctctaaggtatctagagctcttgaaaatcccttacttgttaaaataggcaaagtagtttctggtagttgcaattgagaatctaaccaatatagagatcagatgacaaatggagttttagcccaagtttgcttctcatgagcccagtggtatcccagaccaatcctgtggttatttcccagtgtctggagtggactagacatagtcagtaaaaggatcctgatccttaccagtaaggattacgtggtttagaaaaaggaccagcaacactacatctctaagggaatgacagagattagtgccacatgaaagatttgatgggccaggagtggtggctcatgcctgtaatccctgcactttggaagggcaagatggggagagaacacaggaatgtaagatcagccctggcaatagagtgagatccctgtctctagtttaaaaaaaaaaaaaaaaaaaaaaaaaacctcaaaaattagtctggcgtggtggcacacgcttgtagtcccagctacttgggagcctgaggtaggaggattgcttgaacctgggaggtcaaggcttcagtgaactgtgattgtaccactgcccaccggcctgggcaacagagagagaccctgtctcaaaaaaaaaatgataaatttagggttaacttgcctagtttttctgtgcagaacatgaacagatgttagagaatagccatgaattattttacaatttatcacatggttgttccaacagcagtcgttgatccagattgtgtcccttttctaaagcagatcaccattgaccctggcacctgctgtgggaaattcttttttctttatcccaataaacaaagagtaccagaataaatatgctttcacctgcagagaaagcaacacggtcattccccttatccatggtttcgctttccacagcttcagttacctgtggtcaactgtcatccaaaaatattaaatggaaaattccagaaataaacaatttgtcagttttgaagtgtgctgccctgaagagcatgatgaaatctcacactgccccactctgtccagcccaggacaggaatcatccctttgtccagctctccatgctctatgcaccacccacccactagtcgtcgcttagtagctgtctcagttgtcagatcaactgttgcagtattgccgtgcttgtgttcccttattttacttaattacgaccccaaagtgcaagagcagtgatgctgataattcagatttgccaaagggaagccacaaagtgcttttttttttttcttaaaaggagttttgctcttgtttcccaggctggagcacaatggcgtgatctcggtttacctcaacctctgcctcccgggttcaagcgattctcctgcctcagcctcccaagtacctgagattacaggcatgcgccaccatgcctggctaattttgtatttttggaagagacagtgtttctccatactggtcaggctggtctcaaactcctgacctcaggtgatcctccagccttggcctcccaaagtgctgggatcacaggcatgagccaccgcgcccagccagcaaaatgctttctttaagagaaaagatgacagttcaaaacttactacggaaagaaaaaaaccatacgctgaggttgctaagatctacagtatgataagatattttgaaagagagagaccacattcaaataatttttattacagtatattgttataacgattctattttattagttattgttgttaatctcttggtctgcctaatttataaagtaaactgtatcttaagtatgaatgtgtaggaaaaagcatagtgtagatagatttaggtgctatccacagttttgggcatccagtcaggatctttgaatgtattccctgtgaaataatgagcaactactgggcatcttttccaggatgtgcagagaatcaaacttggagggtatgcaaacagaaaaattccccaaatcacactcaaggattgctctaggaacacaccactgctgtcacttctggccaccaaaattgaagctcaaactatggatgatgggcactgcatgtctttgccagagccgctgctattgcttcctcaaaaaatcacatatctctgcccaaccttgttcctgccataaaaaattccactcagcacctcctttaaatcaaaatcaaagtccttcactccaatggggtgccatggttaaaaaaaaaaaaaaaacgtcttgtgcgggcgcacctgagtggcagggctgtcaggggcccatgccctagatgcaggtgagctcggaaaagcaagtttctgacctctcccttggggagcttcacacttaaggtggagaatttcccaaattgaggtagagaaaagatacataaaatgggccaggccttgtggctcacacctgtaatcccagcactttgggaggccgaggcaagtggatcacctgagatcaagagttcaagaccagtctggccaacatggtgaaacccccgtctttactaaaaatacaaaaattagctcagcgtggtggcaggtgcctgtagttccagctactcaggagactgaggcagaaaatcgcttgaacccgggaggtagaggttggattgagctgagatcgtgccactgcatttcagcctggacgacagagtgagactccgtctcaaaaaataataataataataaataaaataaataaaaagatatgtaaaatggtagatgaggaagacagcaggtagcagaaaaagaaccagagaagagtaaacagttgcatattaacagcggagcgctagaaaagagatcacagactctcactgctcaggtgtcttgctagagccacctttgacccagagacactgatgacctgcctgctcccatatccacaaattccaggatcttgaatccccctgggtttctgtgtcacttcattccctaagtgtactcttacataacccctctgccagtgatttgagccagcctgtggcaatttgtgttttccaaaaatgaccacatcaatatatcccattgcatatgctgttcttcaacgtgacatggacacacctccatctagagacggggtctgtatttgctttctatttctgcttaacaaattactgcaaactcagcagcttaaaatagcacccatgtattagctgacagttccacaggcgtaattggattctctctgcaggatatcacaagggtgaaatcaagatgtcagccaggctaagctctcatctgaattctcatctgggggtaatctgcttccaaattcttctttgatcttggaaaacttcaggtctttgcagctggaggactgcaatctcctttttcttgctggctctcagctcctagagcccatccacattccttgttccatgaccccctttcatcttcaaccagcaagggcacattgaaatcttcccagacttcaaatctctgacttctgtgaccagccaggcaaaactcttggattttaaagggttcatgtgatgaaatcaggtctgccagataatctccctctcttaaagtcaacacatttcagaacttaattaccaaaatcccttcacagtagcacctaggttagtgtttgattgaataaccggaagaagatatgtgtacagcagggccagaaatcttgggaaagtatctcagaattctgcctaccacaggtctattccctttcccttgaatctaggcaggcctgtgactacagaagaagtggcactgtgtgacttccccttccaggtgataaagtcaaacagcctctttctggcggtttttcacttgggacatgtgtcttgggagccctgagccagcatataagaagtcgggctaccctgaagctaccgtgctggagggatcacattgagactctccatagagatagagagagatgtccaaggagccccagcgagcccaggtatgtaagtgactaagacttcaaatgactccagcccccagcctgtaagcagcaatgaaaccaagaggagcagagacaagcagtccccaccaagccctgtcaaaattgcagattcatgagcaaaatgaattttgtcattttaagcctctatactttggggtagcttaataagcagctatagtgtctggtacataggctgaggggggctatttgtccctagtaataaaaaggatttttgactatcagaatctttagagaatattgttggctgatgtcttgtggaatgtcccttactttgccttgaaggactttatattttttatattttttacttgaaatcttgcaagcaaagaccacatcatttttgtcttgttttcctccatagctaacacacaacgtgacaatagactatggtagattgtttgcaaaaaattgcttcagttattgccctccctatatccatgcccattgccatgtgactttgcagttcctcccctcaagagaagtctatttcccctgctcttgaatctgggctaggttgcgacttgcttggccaatataatacagccaaagtgacttctctgaacctaaacctcaagatgccttgcatgtttctgctcatgaccttggaacacatgcacaagctagttggctggaggatgggagtcacagaccccattcatcctcatcaccccagccagcatccagccaactaccagaggaagagccacctggctgacttgcagcgaaccatagatgcataaagggaaccagagcttcccagactaaactgcaaaactgttaagctaaatgaatggttgttattttcagccactaaatgtgggttcctttgttacaagcaaaagttaactaatagaaaagtgaacccacactctttataacagattgattatccctttactctgtcaccaaggatggaatgcaatgatgcaatcatagctcactgaagcctccaactcctgggcccaagcaatcctcccacctcagtctcttgagtagctgggaccacaggtgcctgcaaccatgcctgtctaatttttgttttgttttgtttttagttttttgtaaagacaggtctcactatgttgctcaagctagtcttgaactcctggcctcaagtgatcctcctgtctcagcctcccaaagtgctaggattacaaacatgagctactgtgtcccacccaccctatcccttcttaatcccaaagaacaaatgggtcaaagtctgagtttgatttgcagtagggaagctttattatagtcaagatcgtgcagggtgtgagagcaccccaggccagagagaggaaagaggtctgtctccccaaccctgaaggcatcaaagccaagcagggttggaagccaatggaaagccagaggcacatatgccaagtcagttcagtcccaaacgggcacaggggcttgttgccagctattcctgatgtcaggatccaataagcaggcttcatcgggagtctgcccatctggggatgctcagctggggctgggcaggagaagtttacagaggctctagtatcgcgaaaggaagcctgtggagagatggaagggagatgagggggagaagggaggactgtaagcaggagcagagaggttgggacttgggggaagatggggaaactcgaagcaaggacactagagctcaaagagctggacaatcctgaggtagaaggaccctggggtctcccaatctactggtccccatctaattcctgaatctctgttgcagcaaacctgacagatgcacccccaagtctgaggatggggggcttatgaggcagccccctccattcaacagatttgttagtcaattttttgtatattgaggcaaaagatggccccagcctcactcctagatgtatatccatggacctgcagtgccactggactcacaaaaccacattagacaccctgcagggcagctcccaagcacctcaagtcttctctgagctaaacattcccagttatattacccaggcttttcctataatttcatattacatttttattttataaaattcaatgtgtacatgggaaaatgttccctgatctagagaccaactcacctgtgtgagcctttcttacatttagattatgttcatccttttggcagttgcatcatgtaatacttgtgcaagccaaccactgactaaaatccctgagtctcttttccacctgaactgttgctgatccaggtcccccatcctcatgaaggttgaaagtactggctgtgaagccccacagagctgaacccttcatttgtgattgtatgactttgagcaaattattttctctgaacctcattttccttaaaatggggattataataaaacctacctcatagcgtgtgtcatgataatgcacaattttcaacccatctcctacactactgagactcagccatgtgtagatttggtcctagcctcatcctaggctctgtcaaaaataatgatcaattcagaaccaagggtaggtctctgacacctcactagagatttccctaacatctagctctattcagaatctgtgttccccagagattcaaaaatactcaaaaaaaaaaaaaggtgagaccttgactctccaccccacaacctaggattgtcccttaccttttgtctcatcttggtcaccagattttgaggaagaagactaggaatgggatgattttccgcttcctcctccgtagccgccaccacttccactcgcttcttcaccgcctccgtagctgcctccactttcacctccaaaaccacttcctccaccatggctgcctccacttcctcccctggacccacttcctccaccatagccacccccacttcctcctccagagccacttcctcctccatagttgcccccacttcctccactatgaccacctccacttcctccgctatggccacctccacttcctccaccatagccacctccactacctcctccagaaccacttcctccaccgtagctgcctccacttcctcccctggacccacttcctccaccatagccacctccacttcctcctccaccatagctgcctccacttcctcccctggatcctcttccataactgcctccacttcctcctcgacctccaaggccaatttttccagctccggaggattcactaagaaagaaagaaaacaagagagttaaaatgagcggcccccatacacatatatgaggatggacctggacagagtcaggacccaaacatgaatctttctgttttccttcctgggaggcagaggacagagtctgggcgggcaccacagctgggagaggagagcctccagctgagactgtggagccctcccctccctggagcagggaggcagcccgttctctcagtgtcaccatcctcctttcccaaagcccaaatgcactgaggtccccccggcccccaggatgaagaagtcctcaacccataagaccctgtgtataagaacttcccccagctgcctctatccagagggacagaagtagtatcagaggcctagggacccccaggggttccaccaaatcctgggggacctacaagtcttcctggcctccctcaaggaggttgtggtaggtctcgatttccttctccagccgcatcttaatgctgagcagaaggctgtattcctgattctggcactcgatctcttgccggacgtcagtgatctgggcctccaagttactgatctgctcctggatcatctgcagctggccacagtagcggttcttcgtgtcttccaagctcttctccagagctgctttctaagggttaggagaaggctttaagagggatgctacatcataactcctcttcttcccactcctgggctgcaaagacttcctgtgccccaccttggcaaagggtctatagcagaactaccaaccttgctgagctgagactgcagctcaatctccaactcctggacaccgtgccggagctgggtcacctccttggcactggactgcacctcctgaccactactggatacctcatgctcgatctgggttatctgcaaaaccaaaggctcagtaagcatcaggctgtgccaggagcttcagtgagtgagattctgccccattcaccaggatcttcacctccagggccaaggctgatctgaagccaatgacaagtcattctgagttctgggtaccctccagccatggagggttgtccagtcctctcaacatgacattccctctcaacaaagttgcaagacccttcacgctttgtctcacaaccatctttctaatctaaccttattccaaacttcccccacctttcaaacatacacacacacacacacacacacacacacacacacacacacacacagcacagaccatgccttcatgtatgtgccagactctggctgggcactggagactcaaggacgaagggaaccaccaaggagctcagtacagtatgggagacacactgtatccctctgctatagtcttacattacatagcattagattaaattgttcacattctgcttttgttcacacacatctaataaactgtgagcttctcaagggcagcagtcttgtttggctcatatcagacatcaatacctctgagacatcaatactttacatataacatggcactgagaagctactttgtaatgatgtttgtatgcagtgaatgaagatggatgaatgacttccattggaagatggataaatgacagctgcactgagagatgcagagataggaggatgaaggaatgggaggtgggagggatggagataggaatagatggaggggaggaggatgaatgggcagcccactctgctcacctgagtctcatattgattctcgatgtcctttctgttcttagcaatgagctgctcatactcctgacgcatgtcattgagggtcttggtgagatctttgccaggagcaacgtttatctccacattgacatctccactgttctgcccagtcagctgactcatctcctgccagggaagaaggggagatgaggtcacggataaagtcctctgcaccacctttcagaattctccctctggtccccccagggtacaaaaaggggacacagttgtgaagccaaagcccaaccactaccataggtgatgccaaggagaagttgaaagtgtcctcaagagcaaaggagagggtgtctcccaggtaatgttccaaagctcccctgctgtctctgcatttctgctcctccctcttcccggtaagccataagccccagcaacctacctccttatgattcttcttgagggccatcagctcctcctgcagagtctcatactgcatctccaggtcagacttctccatggtcagattgtccagcacctgccgcaggccattgatgtcagcatccactccttgccgcaggttttgctccatctcaaacctgcagaccagccagggttagaaaacaatcaagagggaaccaggccctaccaggacctccagagcactgaggttcaggggtaagggctgatgacaggagaggagaagaggagcaggactcactttatcctgaagtcatccagtgtcatgcgagtgttgtcaatgtccaggagagttttgttgttgcccactgtcaggtccacaatctgaaaaaaaaaggacacagccatgatatcatgctgtggaccactgctgagagggcaagaggccaggcaaagccacaggaggtgaggattccatccaggaagattctcaagaggaatgaggaacttccaacagctgggacatggcacagaccccttccagccttcagcgaagatgtttggtgtggccttcattcattcattcaacaaatatttgaagatctactgcaaagggcattgtaggatttagagattactgacatcctgttcctcagggagcccaccattgactacaaagtcaaaagtgtcctaaaagagttcaaggaaaggagaggtggcttatggcaatgggagatcaagaaagacttcaggaaggaggtggctggcaattgaattgggccctgaaggatggctaagatgtaacattaataaataaatggaagaggtttagagtagaagaaacagcacattcagagacatgcaggagttaaaacaagaggaatcactgagaatactgaagagccagaccgtgagctccaccagaactaggtctagcacatcactatgtctacccagagcaaccctgagggtaggcactcactgaactgagtggctgaataaatggatagatagatagacatgtgggtggagggaggaagggatagatggaaggatggatggatagatagcttccattcccagatttctggatcctctccaacacttgaataaccaacatgtacagtcaggtccaaaataccttaaaagatcaagatacactcctaaagaagcccaggagaagtacaaaggaagagaaagtattgacttagaccaaacctaaaggaggttccacatccagtcccagctcagctcacgttaacccaggtctcctctctgctctgcccaaactctgaaagttgaggaaatggaagtgaacactcagagcacaggccaaagtcctatcctgggatccccagaaaccaaacacaagtttgtttctgatgaaagcgtacatttccaaaaggtggattccctggctattatctgagcttagagtttagcattttaacttttttggaagataaagaatgaaagagaaagagaccaagacagagacagtttcctgcacctacctggtccttgagatcatcaatagtgttataataaggggagtagttcttctggatagcagcaggtcccttcttgtcgtaccaatcctggatcttattctccaggtcgttgttggcctcctctagagcctgcaccttatccaagtaagaggccagccgagaattgagttcctgcatggtgctcttctcattagcagtcagaataccaccatcacctcctccagcaccacctccaaagcccccaaaccccccaaacccactcccatagccaccaccaaagccacctccagaaccaccaccaaagccacctccaaaacccccagaactactatagcctcctccagaagcaccaccaaaacctctggaaccacccccaaagccaccgcctaaactactggcactaaaaccacccccagatcctccgccgtagctgtagccaaaactgccaccgcctcccctcccacagacacgagagcttcccccaccatagccactagaagagctgaatcggccccctcctccaccgccccctgaggagctgaagcggctgtaggaagaccttatgctgcccccgctgcccaggccgcccccgccacccccgccgctgcggctcaagtaggacgaggagaactgtctgcagctcatgacacagctggtagctcacgggttgagaagcagtgataggagtgctaccggctcccaagtgcagggtacagagctgtccctggggctgcctacttatacccccagctgaaggtggcacgcctgggtgtgcccttgttctgtgccagcctccccccacagacccgagggaggtctgggatacggaggcagccgggctgccccaggctcagcgtcctttggtgactgcctgggggcggcccagcctctctccattgtgtgggataatttgatgacattaggctgtcagggccaccataaatcagctgtactgccacaggggtgacctagatcctggagtctggtctctggctggccccaacagcaggtctgagacttagccccttcgggatagaaactcccaagagcagagtcacctcctctattgatggtcattactgtctgcatccctcatgcctccttgctcccaccttgtgcccactgtgagctgagctggaactagggtactaaggagttatcatagaggagggggaggcacagcccctgcccttgtggagccccaaatggatgaaaaccaatccttgctctcaggatcctcgaggctttctgcagagtctgaggctctgcccttgggagactccagtttgatgaggaggcaactggcatggccaaaagatggagacgggcaccgagaccatgcccgccagcactaaaggacagcgtgcagagttcacacaaagggctggaagaagaaagtggaccaaataaacaaggtggtgctgacactagctgacctctgagcaggaatgcaagtggctcgactgtcctggtccttttgcagggcccagcagggagtgtggaattgaccttggttgagtgcctaccccatacagaactctggaggggatacagagatgtgtgacttatccctgctcctggcagaaacttggatgtatattctggtcaccaaggccagaagagaatggtaaagaacacgctggtctccggtgtgcctacctgagctccatccagctccatgctcatgagctgtgtgactttgataagttacttaaatactctgtgcctcagtttcctcctttgaaaaaggttgatatgagtagtttgtccatctcctagtaagagacttgtgagaagtgctcaaaaaatgttcggctgcctctgatcattcagccccctaactccccgtcaactctgccctcacccagaccttagccatgagcttctaactgccctccctgcctctcccattccctctgactcttcctgcacagcagccagaatgacctttctaatccatgtctgacaacatcacttcaccagtttccctccaccctcaagataaggtccacattcctggcacttaggcccatccccatctttccattcctgccccatctcccaccatcccccaggccccctagaaaatcatacaatgcttcccaaatgcccttcttccctctaagaatactcggcacttgcagtgacctctgattgaaatgtcccactccatcttttctacacagaaaactacccatcttcagtgatccctctgactgcctcctcctctgtcttcctgtactctcgccccctgggtttgtactgtgctctgttatagtgtctcacacttatctccatggctctatgaagcacttgatgaagaataaaagttcatgtactgaaaaaatagaagaaacctctctctgcgggcagccagagctcctctaagcctgcccctgctcatctcgtacttgccccagtgcccagcgccacgtctgatccaagtaggatcccaacacatatgagatggaggaaagataccagtcattccagaaagatgctcattgctgaaaaggagctaaaggtaaggaaatctctttgccaggatggtcagcaagggcctgaaagaggcaatgcctgcatgtgtaggcggcatagatgactggtatttcttgaggggcttttaagtgatgctcaacgactgttaaataatactgaagtggccggacacggtgacccatgcccgtaatcccagcactttgggaagccgaggtgggcagattgcctgagctcaggagtttgagatcaggctgggcaacatggcaaagccccgtctctactaaaaatacaaaaaattagccaggcgtggtggcacacacctgtaatcccagctactcaggaggttgaggcatgagaacaacttgagcccaggaggcacaagttgcagtgaggtgagatctgcgccactgtgctccagcctgggcgacagagcaagactccgtctcaaataataataatcatcctaaacataataatactgaagcacttggaggaagatttcctttttccatgtttgtttgtttgtttgttttgagacagagtctcactctgtcatccaagctggaatgcagtggcatgatcacagctcactgcagccttgacctcctgggctcaagccatcctccagcctcagcctcccaagtaggtgggactacaggcacacaccaccatgctcagctaattttttttttcataaacatgagatttcgctatgttgcccaggctgatcttgaactcctgggctcaaatgatcctcctatctcagcctccaaagtgctgggattacaggcatgagccactgcacctggcctctttttctatttttcaatcttctgattagtcaaggatgaaatctcatttggacactatggcttctctaacgacccacacacttgtcaatcaccctgttcaaaaaaagagagccaactttgggctcagaacctttagaaagtaacagcatctagttagaagttaagtatttctgtatgtcatttccttctgcttctggcaagtgattatgattttccttttttgtagtaatgtaagatttcctttataaatatatttattgaaatgaaaggtgagttaatttaccaaaatgtgttaaataaatatttaaatgggtgttacagaatatgttacattaaaaattaaacaggtagtttaagttttgaaaattaaaagagaatataattctcttttattcaatattcagagaatactgaaggcattttatgatagttaatacatggaagactcttagatcaaggctagtgggtataattgattccctttctactttctcaaatggttttaaaccattcaaggtttttgccaagctctgctgggaagcccagaatctgccgcaatgtgttccaaggcctggaaagttaccctcttccccatgcccatgctgatgccgccactctggttgggatgtaagccccaggtcctgggtccctgagctgggtagggaagtcagtggtgctgtggatgggccaccctggagagagccagcagagtggcactttcagaaccctgctctgtcatctgcaaatgtatctgtttgggggatcctaagaacagctgagacccacctgactgagcagaagctcccagctggggctcccctggccagctaagcctcttgacagatggccctggtttccagccctggtgccaaaccccaacccctgtcctcacccaccttctccacttcccaccctccagccctgtcttaagcctcactcagcccgaagcagcaggcttcgtccctcagaactcctcccagctgccagggaaagaaagctgtgcatgaggaccactgtggggtggacagcacagtagctccccagccaggcaaggctgggccacgtgccagtttcaccctccctttccctgtggtcctcaaagttggcctcagtttcctcatgagaagccccttcatgcactgttgccaagggccataaagacagagggcttccacctgtaatcccagcactttgggaggctgaggtgggcagatcacgaggtcaggagatcaagaccatcctggctaacacggtgaaaccctgtctctactaaaaatacaaaaaattagctgggtgtggtggcaggcgcctgtagtcccagctacttgggaagctgaggcaggagaatggcgtgaacccgggaggcagaggttgcaatgagcagagatcacgccactgcactccagccactgcactccagggtgacagagcgagactctgtctcaaaaaaaaaagaaagagggctccctagatgaatgcccaactgctgcccacatgtagcccctgccacattggccctcctccccctacatctggccttgttccaatacaaagaggatcttgctgtgcttgcagctcctgcggtccagataggaggtcttgttccagctgcagcagggcagcatctcttcccttctcccaagctctctgcctggcatgggaaccagactgggcaagatggggccagggatgaggaaggccaacagccatggcctgagtgagtgatttcttctaggtcatgtggcatggctcactcttccagcctctcagggctcagggtctgccctctgagccccaccttcaacacctcccatgggaatcctccaaagaatgaaccaggaatggaaaccatggagcccatggcaccccggcacctgagacccagcgagaatcaacactgcctctctacagccagtgtgcaaggctgcaaggctgcaagctagacccagtgccagcaacccaaatgcaggccctccccttggggagtggatggagtaggagagaaggggctgcaaggacccagagaggcagacagagggacagagagagaaccaaagatcccacttgcaaggtgtccccagaggcaaaggtatcgtccactggggacatagggacctggagacagctcaaggacagctttgctctggttgtgggagccctcttgcttgcctgcaagcagcctcccacacccccaacttactacccattgctgtctgtcattgatccccaggtggggccagggagggacctgagtcagcatgtagctggctgctgggagagggagcacccgctgagtcacggctcctcccctggagcctccatgagccatctaggcaggtgtgcactgcccactggcgcagggctgtgggtacctgcacctgtctgtcaacactgattctttctcatacaacaggcacttgccatcacccttcccaattcagaccctatcagaccacagtgaggggatggagtgggcccacatacgtgcctccacctgagtctaggcaccccaggcttgtgtctgctgggacacacctagcagtgaggatgagagcaccggcttcgaagccaggcaggtcatggtgtaaagccagattcttccacttatttggggaaagttgcttcccctctgtgaacctgtttcctcattccaaattcggattcatcctttattgagcacctactatgtgccaggcattgggctgagtgctgggggtaaagtaatgagcaagcccttatcttgatggacagttatgggataaaatagacctgcagaaatgaacatgtaattcacaactgaggtgagcacggttggtggggaatggagagcacataataaaggtgtggcatggtctggggtaccagtgaccttctccctgagaaagagacacttgagtgaagggggaggagaagtgagccaggagaaggacaaaggggaggggcatacagcatgtgcaaatgtcctgaggtgggaacaagcaaagtgactgccagggcaggagtcctgtgtggctaaagggcagtgggttaagtcaagcaaaagatttcagtggggaaaaaaaaatagttctgagcttggccagccacagtggctcacacctgtaatcccagcactttggaaagccaaggcggtcggatcacctgaggtcaggagttcaagactagcctggccaacatggtgaaaccctgtctctactaaaaatacaaaaatcagctgggcgtggtggcgggcacctgtaatcccagctacttgggaggctgaggcaggagaatcgctggaacctgggaggttgaggttgtagtgagcccagatcacaccactgcactccagcctgggtgacagagtgagacttggtctcaaagaaacaaacaaaaaaaaaaagttctggcctcatgaagttgttgtgaggcttaaaagaactcatattgtaaaactgctggtgtgggtctggtacatggtgggacatcatcctgactgtcggtggcactgtgcctgctcccaacttccccatggaccatctgggcaacttgggttctcagctcccttgcttattattagcccatccttctggcctattgagcccccattaggatcaaagacctgtgcctgtggggcctggggaggacattgaatgtttggaggatcatagttccttccgtcaaggaacctccagtgttgcaggcaagaccctcgttgctttgcctgcactgtcgaatttaatcttcaccaactgttttaggaggtatgcattaatttttaaatcattttacaggtaaggaaattgaggctcagagagggtatcttggccacagtcacagagctaaacaaggcagaatggagccagggcttgccctccagtgatcaggagctacagtggacacaggctcagagctcctgctctctgtcccaaaccccacacatgcactgggtccctctctaccttcttcctcatgttgtctcttttcttattcagtctgtctcaattcaccccatctcccctacacctacaacagttaagtttcgataagtatgtgtgaatgaatgaatgaatgaatgaatgaatgcccctccctgcctagtactggcccagggccctcactatcctctctatccctgactctgtctctctgactctctccctctccctttctctctctctctcaactctatatccatttgtttctctctatttctgtgtgtctatttttgccctctctctcaagccaagtcacccctaaagttcatcagagcaccttaaaggaaaaagacttcctttcccaagcctggccttacagtggcacagagggaagccctgtcaggaaagcctgtgctcagcaaacggcaatggaggaggagctggtgactgccctgcacttgcctgaggccggtccatcgccctggaagtccctggcatcccctggtcccctttgtggcagcctccaagctcagtgaggtgggccagggaaattcctggggtcccacaaggacatcgggaccccccagcccctggggatcaggcctccttggggctgcctcctctgacatcttcctgtaggaatagtcgcctacattacccaagccaggttgtctgtggctttggggaagtgccatttgcctgattaggaaggtacatatgccagttgctgcctatagagttccctggacacattagagatcttttcaccattaaaaaaaaaaaaaaaaaaaagctcccaaaaataaaggggattgagaatttcaaggtcggttccaccccataaaacaaaaaccatggagtaagctacgaaaaatgcacactgatcccataagtctctcagttttatctcatccctgagaaagaacggaacaggaatgaagccacccaggacgtggcaaagcctgagcatggacaggactttgccactttcagccttaggacctggagcaagccagtctccctacggtgaggttggaggagtcttcccggtggctcacctaggactgccgggttctgagtgctgggagggtggagagagggtttagagggaggcggagccagagagggcacctgatcagccccaggactcagagatgcaatcccagctgcctccactagactgtgctatcgagtcactttgctcgtctattgtttagctgagcggaggccaagggaaggcggtcaccattgtcgaagctgctgggctcactcatattttgagttggatgcttgtggctgccaggctctgtgaacaagagccctgttcatcagcaggatccaaacactggccctaccctccccagtgaggtattgtggggaaatcccgggaggaggggagtccatgtgagaccccggtggccactgccctgctgccctcttcctctggagcctgacagcacagggtgggactacctcccagcctccctgcttgacttcctcctctcctggttctgagcctgctttcagccaggtggtgccagccgccattcttacccgcaagcaagcccaggtctcctgtgtattcccttcaaacagtaacggcaaccactcagagaggaggctcgccccacctcaccccagtctaagagacctcacgtttctatattcctctaaagcaaatctcctttgggcacagactttaatctggttccacctccaaggtagagagatgtctggggattcttaggaagttgagggcgttctgggcttcagtccccactggtgactcttgccatattttgctctttgtccaggcccatgtgacctctcaaatgtgggccattcccgagattctttgccacacttgggcaggaggttcattgcccaactaggaaccttaggaaccagagtccaacacccctgggagtatcacaaagcccctccccacactagggtcctgtaccccctagggccctcaaacccacctcttctcattctctgaggaagcaccctcaaaccttcctctttcctgagttgtcccctgtacccctgaaactctagtacttcacctccaggatggcccatcctcacccagggatcacctaaggtcaaccctttttgatgacaaaacttaggttaaaagatatcccagagtttcagaagtacaaagcagtcctctttctcctggggtggaggtaggaacaagagaaaccaacatctcttcattccttttcctaataactcaccccattaccatttatagggtgctgactatgtgccaaacacaatgccaaattcattgcctgcatgaggtcattcactcctgtatcagcccttatgcagtaaagatatttattccctaccttgtgaaagaggaatgtggggttcagtaccttgcccaaactcttcaaggctattcagcataggagccaggactccaacccaagtagtctgattcaaaagctcaggctttcagatcccttgcccaaatttagtcgtttttcagtctctcccctacccttgactccccctacaagttttcttcaggcagccaaatgaatgagctgttgaaactgacacaggactagtcaactctttcctagcttggggcaatgagccccacccacctctggaatcttcaccacttactagggtgaggctccttgccttcccactccttttctagccccccaaagagaaggaaaggcattccccacccaggggagtctcctacagtcctggctcttaaggtatagtcactcattggattcttgtatcaacctcaagaggcagggctcagcatccttactatacaagtaaagacactgagactcagactttccaagctcacatctgttacagaacagagccagggttagaaaccagtctattctcaaaccctctaaaaatgctctcatcgtgaatggataatcaccatgccctagagatagtttacccagtatcgccagcacagccatgccttgagccagcactatgccaggccctgtgctggaggccttaaatgcattcttccagtgaattctcccaacaagcccatgaggtagatactatcattatgccccttttacagaaatggcagctgaggctgggagctggtcatcaacttgccctaggttaaccaagtgtaagaaggattagatccagcaccagaggcaagagcaggtggggtggagggagacaagactgtcaggagagcttgagttcctacttcggttcatggacctccggtaaggagctctaggagacccatgaaccccatgacattgtatgcaaatgtatgtatgcttatttgaaggtagggggcagaaggaaagatctatagctttcaatattctccaaggaatccctgatcacaaaaacatcaggaatccttaacctaacatagtgcctgacatagaggcactcaatatctggtgaatgaatggacacacatgaaaatgagtgagtaaatgaatgaatatccctccgtaccctaggagacaccacatatgacctggtacacacatctatctgtgtcttctgagatggcgaaagatatcctgggacctgagcccaacccacccccaggacttttctcccagtcccaggggccatagccaggtgctatgacaagctccaaagagatgcttctcccactttctccccacccccactcctaacaatgaccagagagaggcgagaattatgcaactcagataatgaagctgtattgattgccaggagggggtgagggtgaagcagggtccagctgtgaagtgcttgggcaggagaggggatcttccagtgggatctgtgtccacacggggggcctcctaggcctgagcggggctgggcagcctcagttcttggtgcgaaggacctgctcgtgggtggacaccaccttgccatcgtgcacatccatgaccttggtgcggatttggcggctggaggaggtcactggggaagaggtgggaagaggacgttaccagaggtggacagacaatggactaatcaggagtaaggaggccaagaaggtgaggaaactcaaactggctccccattgccctctcccctgattactgcttcactccctgctgttgcccaagcactgataccatcaacacatttctttcagacgagggctcccaaaggtcagagacagagtctttgccctcagattagagcttcctaagagctcacacctggctggttccatccatattcacccaatggagtggtctcagtgggaagagccctgtagggccctgttcatggtgctgaccacaacagcaataggatctgccacagacaccacgtagaagcaagaggtgggggctgcctctcctagccctaaggagggtttagaaaatagcttcttccacccaaggaggttcacaagggaaactgggtgacagcactagagctcagcccctcacggagcccctagccaatgcctagacctgcttggggtacagagggtggcctggagcccaggcctgcagaggaggagggtcttaccatctctggatgactgcgatccagaggagaactgggaggaggagaggctgtgaaaatagaaaaggacaggatcattagatacatggtggggccgtgagagtgccatggggggggcggactaaggggagggccaagactcactgggcgtcctcgccctccagcaggcggcggtaggtggcgatctcctgctccagccgcgtcttcacgtccagcaggatcttgtactcctggttctgctgctccatctcgcagcggagctgggccagctgctcctccacgctgccaatcatctcctggatctgggccagctgcatgcagtagcgacctttggtctcctccaggctgttctccagggatgctttctgtgagggagggaaagggaatcaacgattagtgagtgtggccgttctctccctgccagtcctgggtgcaccacccttcctggcactattcctaccatgctgagctgggactgcagctcaatctccaggttctgcatggtgcgccggagctccgagatctcgctcttgccgctctgcaccagctcgctgttggtggccacctcgcggttcagctcctctgtctgcaaaaaagagaatgccattcacaccagaaggccccagaaggcaggtggtctgggttccttccacctcaaatgacacccaccttggtgaagaaccattcctcggcatccttgcggttcttctctgccatcttctcatactggtcacgcatctcgttcagaatgcggctcaggtccacgccaggtgcagcgtccatctccacattgacatctccacccacctggcctctcagggcattcatctcctgcacagccagggacagtccacagtcaggagttccaccatggcagcggattggtgttccttaggcctgaatactgccctcccaccatcacaattctatctcgactctcccttctctctctctctctcaatctctctctctctctctctttttttttttttttttttttttttttttggacagggtctagccttgttgcccaggctggactcaaactcctgtgttcaagtgatcctcctgtctcagcctcccaagtagctgggactatgggcacgcaccactgtacccagcctccctgcatttcttttaagctgacttttccatatagttctcacctcctcgtggttcttcttcaggtaggccagctcctccttcaggctctcaatctgcatctccaggtcagctctggccagggtcagttcgtccagcaccctgcgcaggccattgatgtcggcttccacactcatgcgcaggttcaactctgtctcatacctggaatgaccccagagaaaaggtatgagacacccatcctgatcacagcgagggctttgttctcttctccctgcagcttctcccagagctggtgccttgtgggtggtttaaggagccaatcttgaaaatggcgtggttgaacacagtgcccattgattgctcagatatgaacattcctgcgggctggggataaggcagttcatcttgctgcagaaatcaggagggggttgcacttctagcttcagccaacaaataatgcagaagtcctccaactatgattccttcctatacttcaagggcagctggggaagtggaaagtgcctctccctaaagcagcggttctgaaacctggctgtggaccagaatcacccaggtaacctgctataaatagctgaatcaaaactccaagggtggggcccaagagtcttattcttttataagcaccccagggagttttcatgcacctatcctggtactggctagttctatttgggaaacactgctccaaaaatgccctactctggggacactggatgttctggcccaccatttcaaactcacttggtgcggaagtcatccgcggccagacgggcattgtcaatctgcagaaggacattggcattgtccactgtggctgtgagaatctgcaggatggaaaaggcacaggtaatttgtcaaatggacttcacaagctggacttcactgtagcctacattaagctcttgcttcatgttcttgcctgaatcccccttttcccccacaaaacttgaccatagcagcccaaaggaaaacagatgccccaggcctgtcctaagactttgctaactcatggtcaacagagggggtagatgcagccccgggcttagaatcgaaagcccaggagttctggtcccaattctgccagtgtcttgctgcaaaacctaatgggtcttggggcttcaagttccccacctccaggtgaggagaataatctgaggctccctagccctccttcctgagctgacctctcttctgtctgcatcagccagccctgccagtcctctgcagatatgcacattccttttcaagctcacaggccatgggacttcaagtggaactttctcaagagataaaacccaactaacacaggggattagaaaagaggactcaggggaagaataagaagatatattggcccctgagtctggttggatttccccacctcatcattgaatttccctaatccatgcaagtcattagagcccaacagactccagcagggagggctcccaagtaatgtgggagcagggaggagggggctagagtcagggcacaagcctgccaggctctctctgtgcagggcacatcaagggaccacactaattgtctctgcaggctctccatgcccgcctggctgtggggagggaccagcctgtaccaaggcttatgggcggcggcagccacagcccagactagtgagctaatgagtggtttggatgtcttgcctggtcccgttagagcctcactcctcccctgtgctggagaacaagtagctgcctcctgtgctggaaggtagggcacaagggccccagccttggctctgccattaatttgctatgtgacctgcagctggtcacagcacctctcgaagcttcaactgcttcctctaaaaaatgtaaggataggaatcactgatctcacatggtctgaggatttgagatcagaaggggatgaggaggctggggaagggaaagcatcttctcactgatcagtcttagggcatccaagacctcgaaagaagggatctggggtggactctgtcctatagagaaatcttaaggtctcaggggcctggggcatgaattgttcccagaaggagctagctggaatggtgccttctgctgcccattcacccaccttgttcctcaggtcctcaatggtcttgaagtagggactgtagtctttgatctcagcaggccgctgcctctggtaccagtcacggatcttcacttccaggtcggcgttggcctcctccagagcacgcaccttgtccaggtaggaggccaggcggtcattgaggttctgcatggtcaccttctcactgcccaccagaagcccatcaccaccagcaaagccaccaccaaagccaccacccaagccagcaccaaggccaccaccatatcctcccccaaagccactaccaaagctgctgctgctgctgctgaagccaccgccatagccgccccccagcccgcaggctcccccagaggagaagcgggaggatgagacagacaggccgcccccgtaggtgctgggggcgcggcaggaccctccggccaggacggaggagatgcggctggagccgcccccgatgccgcccccgatgccgcaggagcccttcatggagctggaggaggtgaactggcggctgcaggtggtcatggtgcagaggagggaggtgagcgagcgagcagttggctgagtgaagagaaggtgctcgggtaaattggaaagggatgcgagtgctttatactcgtgggtagggggcgggtctggcactttccattccccttggctttcatcacccacaggctagcgccaactcccagccaggtccctcctctcatccgcctcatcatgtctgtcatattttactggaaactcattgtttggagtgttttgggctttcttgtcccgccaggcgtgattcacagggggaggtgtgggcctgcaggctacactttcccatcggaccctgggagtcccagccctcaggaacccgcgcactgggcttagccagggtgacagagagcagggcctctgcaccttaaacctagttacctgctagctctccatgaactgaatgggcctttaacatccacgtagaggaagcctgctgctgcaggggatggatacccggctggaaagcaccggcatggcaaggtcaccttgggcacagacaggcctccctcaccatgaccctctattagagacaaggaggtctggggggccctcccaggcctgacctcccatgctgtgctgagaagtctgtcccatccctgaaatacacccagctagtcaggtgtatcgtggttcccaccccaacatccccatcaaagagaaatccaggcagctctccccagccctgagcacagaccctaatctcctccctatggtgaggatctcacatccaccacaccatagggcaggtggcctcatggaggccaggaaacagcctggagtcaggtgggtcctggctctgccatttacgcctctgtgacccagggcttggcacttctctgagcctcagtgttctcatctgcaaagtgggagtcataccatctattctgcttagtgcagtcagctctgagaatccaatgcgacaatgtatgtgaaagggttttgtaaaccgagtatggcaagaagcctcgttggcattgttatagcccaggcttagccccaaagtggctggagctgcatccaggaacaggcctaggggggccttttattcttccagccccagatatcttctcagacccccagaacatccctagtgtgggcagctcaggcgccctcgtttgagccccttgtggaactggcccaggagatgttctggggaggagtagaggctggagtggagctgggctgtgccaagggcaaggctgaggtggacacgagggtccctgactcctgaagccccaagggtcaggggacatttctaggagtccacttggtcctgctttggaggtgtgtatatcaaaacttcagcaatctcccagacaacctcccaaagcaaacccttccggcccccaccccaccctcccatcagcccctaggctccacagaccccggcaggcatgttgagaggaatgtgatcgtgtctggggctgcctgacgcatcctatctcctcagacaggccccaacagcccctgctggaggctccaatgctcttcctgggatcaactgctcctagaagagaagcaggaccctctgtcacccccaaccccaccttgactgtcaccaaagaagaagccagagaagggagccccccactactgtggcctaggagcttggaagacaatgctgagacagacatctgagctgtgggctccccaaatctgccagcaaaggactctcaaggatgtgagtaagccagggccccaccccgctccacccgcccctgacagacactcctaatctccctgcagagaatggtccccccaccctggcccagccctacaatttccccagagagaggcaacaggggttttggctgagggacagatgcttttgttgggaggcatgttgctgttggctgtggggcaaggggaggctgtgctcactggagaaaaatgctgtgtccagagggatctgggagcgggaatggggtgcagagcccagtaccggcttcctctgtgccccaccacccccacccaccaccaccaccaccatgtctccttcttatgcagggatcaggaatagaagctccggagcccgggacataggaacagctctactttccctttcatttcattcaataaaacccaaaagaaactccttcctccccctcctccgaggggaatccaaaagataaagatggcagggaaccaatgacagatcagtcaatcacataatcttaaaaggcacttctgcagtcccaccccaaccccacgcaccaacaccagaaccctagcatggaatataagcctgatcccccacacccggtcttagaaccgtgacccaacctggagcctgaggccaacccctgcagacaaggactcagtgaccaaggagctgcaaacaacccagccaagcagggagcagacttagaggacaccacactcccctcccctccctgatgccaaagaagcatggtactcagacattttaagggagggcattttctggggcatcaggggttaaagggttgtcagtcctgactgctgaggcccagagtaccccccacctctggacttctaggcagactttgtgtgagcaccattacctgaccctccctccagcctgccccaaaaggaggggggtaaaggaggagccccgggcaggacctcttgtggttagtgagtctccctgcaccaccctgcatgggggagccctctgccaatccaaacaggtgaagctggcagggccaggcagcacctccagagcccacactgtgtgctgaggactgtgctggggaccaggagatggcatcctaaggaaggaggaaacctcaggacagcccccgcccttggagtgcatggcctactggaagagacgatccctgcctttaggaaggtcccagcatgaaagagaagcaggaatgcacatcaacattacttaacatacaaacaaatggaagaaaagcacagacaagtaagattggtttcccagggctgccataacaaattaccacaaatttgatggcttaaaacaactggctgggcacagtggctcacgaatataatcccagcactttgggaggccaaggcaggtggatcacctgaggccaggagttcaagaccagcctggccaatatggtgaaaccccatctctactaaaaatgcaaaaattagccaggtgtggtggcaggtgcctgtagtcccaactactcgagaggctgaggcagaagaatcacttgaatccgggaggcagaggttgcagtgagccaagatcacgccactgcactccagcgtgggcaacagagcaagactccgtctcaaaaaaaaacaacagaaatgtattctctctggaatacattctggaaaccataagccctgaatcaaggtgttggcagggccacactccctctgaagactctggggaagagcccttccttgcctcttccagcttctggtgcctccctgagttcctcggcttgtggcagcgtcgccctatctctgccttcatcttcatacagtcttcatctctgtctttttcagtctcttgtaggacactcattggatttagcaatcactctaatccagtaggatctcatctcaaaccttaccttacttacatctgcaaaacccctatttccaaataagggcacattctgaggtcccaggtggacccgatttggaggaaccctatttgacccactataccgcataacagactgggtgcttgtcaccttgcaaagcaatagtaaaaactgggtggagagatagatggttgagatgagatgtgggggcggcccaatctggaaggcttctgggaacagcctttagcgtgacacgtcaagtcaccagggactggatggcagggagccacggaactctcaggtcttgggtccgtacttgacatcatccactttttttttttttttttttttacacagggtctccctctgttgcccagactggagtgcagtggtgggatcacagctcactgcagcctcaatctcctgggcccaagggatcctcccacctcagcttcccaagtagccaggactgccaccatgcccagcgagtttttacttttttgtagagacaaggtctcaccatgttgccaggctggtctcaaactcttgggctcaaacgattctcccacctcagcctctcaaactgctggcattacaggcatgagccaccacacccagcttctttttttaaaaaatgtttattttgaaataatgttagacttggctgggtacagtggctcacacctgtaatcccagcactttgggaggccaaaatggcagatcacttgaggccaggagtttgagaccagcctggccaacatggcaaaaccccatctctactaaaaaatacaaaaagttagctgagcgtcatggcaagcgcctgtaatctcagctactcgggaagctgaggcaggagaattgactgaacctgggaggcagagattgcagtgacccaagatcgcaccactgcactccagcctgggcaacagagcaagactctgtctcccaaaaaaaaaaaaatgaaataatgttagcctttaagaaaaagttacaaaataggacagagagttcctgtgtatcctgtgtatccttcatccagcttcccctaatgtgaacatactacataagaatcatacaatttttgaaaccataaattaacattgacacaatactttttccccccacaagatggagttttgctcttgttgcccaggctggagtgcagtggtgcaatctcggctcactgcaacatccgcctcccaggatcaagcgattctcctgcctcagcctcccaagtagctaggactacaggcgctcaccatgaagcccgggtaattttttgtaattttagtagagacggggttgagccatgttggcctggctggtcccaaactcctgacctcaggtgatccacccgcctcggcctcccaaagtgctgagattacaggcatgagccactgcacccagccaacacaatactattaatgagctgcaggctttattggaacttccaccagtttttccacacatgttccatttctgctgcggggtccaatttcagtctccacattgcatttagctatcacgtctccttagtctcctcctatccatgacagctcctcagtcttttcttcctttcatgaccttgacacttttgaagagtactggggtgatcaattattttgcagaatatccctcagtttgggtttttctgatgttttctcatgatcacattgaggttatgcactttggcaagaaaaccacagaaatgaggttgcatcccgtcaggcatgttggacagatatgtcatgtgtcttaccgctggcaccatcaggcatgttggacagatatgttgtgtgtcttacttaccgctggcgccgtcagccttgttcacttggctaaggtggtgctgctggatttctctactgtcatgtttctgtttctcccattgaaattaataaataccttgaagaaggtacttagaaactatgcaaaaatcacgtttctccttaaaatctgacccactaaattttgcctccatcagtggagggaacgagctcacctcaacctgagtttaagagcctcatttgaaggaactccttgagggactgtggcctgcaggagagactttgggagatccaagcccagagaaagaactctttcctgctctgttgtccccccccaaaaccaaactgggccacctcaaacccgagatctctgtgccccaagacagcagtccgcaacctttttggcaccagggaccggtttcatggaagaccatttctccttggatctagggggtcgggggtggggacggtttcaggatgaaactgttcctcctcagatcaccaggcattagttagattctcatgaggagtgcacaacctagatccctcgcgtgcacagttcacggtagggtttatgctcttatgagaatctaatgccactgctgatctgacaggaggcggagttcaggcaacaggaggtggagctcaggctgcaatgctcactcaccagcagctcacctcctgctgtgcgggtcctaacaggccacagctggtagagtctgtggcccaggagttggggaccccttccctgagacactcccatgccggcttcccttcacaacgtattattgtggagaaatagcacatatttctctcacgattgtcaagagccttgctaggcccccgccagccctggggaaagaagtggggaatctggttcctctcatgtcacagatgggaagtcttgagtctagaaaggcccagagtcaagtaacaaattggagcccccattgtgattcccaggcccccagaacctgccaggggctgagcttctcctttcctcctggcagagtcctgcacccctccctctcctctcggcccctctgcaccctcccctggagtacccccacctctggacttctaggcagcctttgtgtgagcagcattacctgaccctccctccagactgccccagaagtagtggggtaaaggaggagcccagggcagggcctcttgtggttagtgagtctccctctaccaccctgaatgggggagccccgtgccaatccaaacaggtgaagcgggcagggccaggcagcccccccagagccccacccccttcaccttgcccatccctctccccgccaagcctcagaaaactgtgtggagagtgggtaaagctcctagagctcagggctatcacttgcagagacagtgggctggggagggagaagcctcagctgccagaagggcagggcttacttggaggccataagtcggctagcaggcaggattgcagcacaagggagcaggagcctagagcacctcccgaggccccagggtccccttttccccagagagcaggagcctagagcacctcccgaggccccgggatacccttttccccagacagctatgccgcctgctgatttcccaggccagcctgcccatctgggctgacacaagagatgggctgagccagcatttcagtgtctgtgtccttgtctgagcctccaagctgtgccacaaggctgacaacagagcttggccagcccatatcatagaataagaaagctcagaggtggaggagttcccccaaggcccacagcaagccacctgctcagtcagggttccaccccagctcagctggctgcaagcctcactttttaatgacaggtcctctgctgctagaaagcccccaaaagtcagagccaaaaacagcctctagaccaggctcttaactttacagatagaaaatgtgagtcccagacaggggaaggaacatgtccaaggtcacacagcagaagtgtcacccagggttctgagctaggcagggtaagaatatgcctggggtgaaaagggctgtgcctgcaccccagagtcatgttcaggttgttaaaaatgcagacagtcaggtggccaaaggcaaggaatagattagtttacaaccctgccgctagctcccagttcaggcaaaatgcagcttaaatgctccagcccatcactcatgagaccccactgtaaactgggtcccctccccaacaggcctgtccccttgctggtccctacatctccatccatttccaatctctgcctgaatttccacatatgtcctctcttcctacccaaacccctcatgttctttaaggccaagcctcagttccacatatggtttatgcagattcctgcagactgtgtggcacaaagtaggtgctcaatgaaggaaggaagcacagagggagggaggatggagagtaagaggagggaggacagaaggaggacagagggagggaggagggagagcaggaggaagggaaagggaagagggtaagggaatgtagaagagggatggatggatggatggatggatggacatatagacggatggatggatggatggatggcaggtggacagatggatagatgagtggaaggaagagaagaacgagggaaagtggagggatgaacggctggggagtgatcagacagggaagtagatgaatggatgaatggaaggaagggaataataatgggtaaaaggatagagggatgaacaggaggtgggtggatggtgggtaggcaggtgggtgaaggatggtggggcactgagaaaggacagccagcccagctgggggcagagggggccagcatcctagaggagctcttaactgatctgaaccttgaagatgagtagatgctgagcaagcagcggaagtgaggatagacatcccatttgcccaaggaagcacccaggcaaagtgcagacgtgtgaaagactggtctgatggaaactgcaagcagttatgtattgttagagttcacagctcaaggctgggcctgcccgatgaaactgagagccttaggccaggtggtgataaaggtgctgggaagctcagactttatcctgatgacactggagccactgaagggtcctaagctggtgagtgatgctgtcggatgtttcacaaaggccaccctggtctccatgcagaacatactttgccgtggtgtgggggaccagtagggagaatttgccatatccaggtaagggatgttgttggctcagacctctcctctcccaggaagccccaccccatcagctcaggtcacctggctttctccccatctctcagacctcccactgcctctgtgatctgtgcccccacccttgattatacctccccatagtgccttagggggccacaaagtgtttttcacatagtcagtcctcagtgttactctggtctgatgcaggagacacaacccttgcccgtgggctgtccagtctgatggaggagggttgcagagcccagagttttccctgtgccataggctgaggggagccaggagcacaggagccacaaggtggggtggattagcacacagaagttttcttggaaagggtgcgctttgactcaggttttgaaagaaggaagaaccctggagggtggagtggggagagggcgtggctgtgggaactccagcacagtggtgagttgcggggagagtcagcacctgggagtcggaatgtctgtgtcaggagtcctgagctctggtcggcaggacagagggaaagggaaagaggaagggaaggggtcgccgagtagttctagcctcatggatagaaagagtcatttcccacagtcagagatgtgggaacagattcagcatcttgcaccccacctccctcccccagacgggataccgcatgggatcaaggaaggagcagggcctcccgatcagaaagaccagctttcaagtcttggctccatcactgacgagccatgtgaccttggacaggccattgcagccgtccaagctttggttttccatcaaataggaatagaaccagttcagcctggcaggattattgagaggagtgggtaagtcagcgcaggtggccagcatggtactgggcacagaggaagtgtttggtaaaagttcacttaaattaagcccaagttagaccaaagggagtgggggatgcaaatggagaacaggtgtcaaggttcagccaaagaccttgaggcagagaacagagaagagtccaggatgttactggagctcctgttgcaggagctgggagctgctgaggtcagccggccaggtgatgggctggtgagtctgcaagggcctggccagggtggaggctgtgggaatagggcaggcctggaaactgatgaggaagagtcagcggatggtttaggtgtgaggggagaaggcctgggagcttccagcagggcccacattctgtggctggaatgaggggatggggaagcagcctctcaggtttcaatgaggccatcctggttgtcagtgcaatatttgcaaaaaaatgaccatttctgtctcccagttccaaaagagggcatggatggcttatgataaaagacatatttataataaaactaaaaatatccagcaaggatagaagaaaaataaatcaagaattaggtaacaggatatattgatgggcacattttggttgcaagcaacggaaactcagcttgaattagcttctaaaagaggcaattcagggctgggcatggtggctcacacctgtaattccagcgctttgggaggctgagataggaggatcacttgagcccaggagttcaagacaagcctgggcaacatagtgagataccatctctacaaaaataaataaataaaataattagccaggcatggaggcatacaccagtagtcccagcaactcagaagactgaggtggaaggattgcttaagccccagcaggtcaaggctgcagtgagccatgaccacagcactgcactccagcctgggtggcaaagtgagactccatcttaaaaaaaaaaaaaaaaagacaatcaataaaacaataaatcaagccccaatttataacatttatttttttcgtgttgtaaatacccccactgtggccaatttcaagcaaccaacagggagtcacttaacacagggttgggaagagacgtgcagtagctcactgccttatagcatgtccaccatatggataaaatggtcataagtacctcaagagcacagatattagtacaatgtagtaaaataatttggaaggaatgagttttcagtatgcattacctttgttctcaatataattcatttaattttaagttcgtataatttaatttttgatgagggccatatttaacaatcaccttgcaaaattcctgaaattttaatgtccagctctcaagagccagcatgagccagctccagcgtgccaatgagcctcgaggtttaggccataagcaagagactaggagggacaaagggaaagcttctggataaaacaaagtgaaagagggaaaaccagattgggggaggatattggtgagggaaggggaagaagagttggtgggcccccacggtcagggagacagcctaggtggacaggagcagaggcagcatccagaggctgtgcagccttcacaaggcagaccaggcactgtctgcctcccagggagccacatgggagccccatgggggtatccaagtctgtgctgcctcgttatctcaattatctcatcagtgttctgttggttgttctctctgtcagcatctagcgaggactgttctactgcagcactcagtgtgcatctgtcctttgactgtcccagcttgagtgatgtctgtgtgtcccaagactttggttactccccatctaacttaacccatatgagcaacacccccttcaaagaactggaggagtgattgggggaaaggaaatgatggtgctgggggtgttggaggtactggaggtagtggtggtggtggtggtggtggtggtgatggagatggagatggtggtaatgatggtggtgattgtggtggtcatggtggtgatggtggtagtggtaatggtggtgatgatgtggtggtggtagtgggggtgggggtggtgatggtggtaatgatggcagtgattatggtggtgatggcagtgatggtggtagtggtgatggtggtggtgatggtggtggtggtggtagtggtggtgggggtggtgatttcagtggtggtggtggtggtggtagtggtggtgggggtggtgatttcagtggtggtggtggtggtggtgcaggggcgagtggtgatggtgggggtgatggtggtggggcgtattggtgtggtgctggtgattgtggtggtgatggtagggatggtggtagtggtgatggtagtgatggtggtggtggggctgtgggggtggtgatggtggggatgatggtggtgggggtattggtgtggtgctggtgattgtggtggtgatggtaaggatagtggtagtgataatgttggtgatggtggtggggaggtggtgatttcggtggtgggggtgttggtggtggtggtggtgatggtagtagtgttaatggtgggggtgatggtggtggggggtattggtgtggtgctggtgattgtggtggtgatggtagggatagtggtagtggtaatggtggtggtggtggtggtggtggtggtggcggtggtgatggtggtggtgatggtggtaattatggtaattatggtattggtggtggtggtggtgattatggtggtgatggtagggatggtggtagtgttaatggtgggggtaatggtggtgggggtattggtgtggtgctagtggttgtggtggtgatggtagggataatggtggtggtggtggtggtggtgatggtggtaattatggtaattatggtattggtggtggtgttggtgattgtagtggcaatggtagtgatggtggtagtggtaatggtggtgatgatgatggtggtggtggtgatggtggtaataatggcagtgattatggtggtgatggtagtggtaatggtggtggtgatggtagtgatggtggtagtgataattgtgatggtggtgattatagtgatggtgggggtggtaatggtggtggtgggggtggtaatggtggtggtgggggtgttggtggttgtgatggtgatagtggtagtgataatgttggtggtgatggtggtggggggatattggtagtggtggtggtggtaatgatagtgatgattatggtggtgatggtggtggtggtcatggtggtgggagtggtgatgatgagggtggtgatggtggtgctggtggtgttagagaaggtaagtatgacaatgaaacccctgagtcaagtctcttgttctgtagaacagaacagaaccagtttaagcagtcatcaccttgagctagcttaggggtaaaacataccctcttacagtctcattccaccaaagttaacatgtattgaggacttaccaggggccaggtcttaacttcatcatgtcttctaatcctcagagcaacactaaggcaggtagggagtggggctggggttcaagcccaggcagatctgctcctgggggtgggtggggggtggttattctcactgtagagaactcactaaggctgcaattcttgtggccatgtgggcagatagggcaaacaccagccactgtttaagcctctgtaggtccacagcccagtccccacccacttacctagaagaggaggagagagagaggaagcgtcagccaaggcccagctattgagaaagagctcagccagtaggggtactgcccatcccctcacacatcaaaggcacctctaggggaaggaggacaaaaagcaccattgcctgtgtaggtgctgtaaataagtatcttatttaaggccaaggtggctcctgacttatcactgaatccccaccctgcccccaccccaaacccagcacaacacctggcccagaacagcctctaagtggacttggactgaattcactggcctactgctagcacccaccttctctgcaagcctgatcaagtcaaacaagaccagggatcttctcaccagggaagatctatgcagaggcggcacagggttgggggtgcagggcattctgacaccccacctactggtcacgcacccttgagtaagtcgctcagcctccctgagcctcaatttcctcacctgtaaaatgggatgagtcaggtgtgtggagatagcgaggaggccttgcagggagcatgcagggagaaggcatttgctccagctcatctttaggaagcagaacacagctgcctgtctgcagccttgctgccagaatcaaatcaggcaataaagggttgggcaacattaaaaattgtcaaacaggagagggaagcaacaaaaaatgtttattgggtacatactgtgtgttttatccaccctttatctcctctattcctcaaatgaactccttcagataaatactaataccctaaatgtacggatgaggaaaatgaaactcacagagaccaggggcgggtggaggatccctccaagttcacgctggaagttcagcttcaggttagcctctgccctccccccagctattcgacactacctcctgcaaaggactgtgatctgatctttttaaaaaatgttttctcttggttatcagttttaatttgtatagttatattattatctaagcataaagtaaattaaaaatctattttatgatcacataaaattgacaggccagaatattagtgcatgcaatctgtttctaattaggaagtcgatgtggtattcaacaaattaattgattctttggttcttaaattgttgtttagtttctttattcatatacacacacacacacaattttatgcacatgtattaaaatgtgtgtgcactctttttgttcctttcctgtttttcttggctccccttttcccctcaaccactgccacccacatcagccttcaaccccacccccacagtaatctatgttcataactctgtatgtatcttttcatattgttggtgcttatataatctcacagacacatgcacatgcatttacataaatgagggatgaggggttggctgtttatttcacataagtgaaatcaatatcctacatgtacatttctgcattccacatttctctctctccaatccctggaggaatccctccttgccatccaataaatagctccaatttattgactataatggctgcttaatactccagggtagcagtggaccattatttattccacctgtccactatcaacttttaaaaatgtgtttgccaccttctgtcactacaaataaacagcagtaaatatctttgcacatatgcctttttatactggtctgttatttctattaatttaaaattaagtgaagtcccttaaataatttgaaagtcatctttgctgtataatcacatataacaaagctggaaaagaacctggtagaataaaaggtctggtgacagaacaatggatgagtgttttcattttctatatttccttttgtttcgtcacactattcatatggtagataaaagctagagacgtatgggattttttctgttgttttttgttgttgttgtttgagacagggtctcactctgtcacccaggctagagtgcagtggcacactctcggctcactgcaacctccacctccttgattcaagcgattctcccacctcagcctcccaagtagtggggctatgggcacgcaccaccacgcctgtctaatttttgtattttttggtagagatggagtttcaccatgttggccagactgctctcaaacacctgacctgaggtgatcctccctcctaggcctcccaaagtgctgggattacaggcgtgagccacagcaccaggccgacgcatgagttttatgtgtaacaatcctaacatggtaggagaaagagggacccttgcaatcaacagtgtgttaactaggggtgaagtcagaaatggcgtctcctggatagctgccactattgctttaacaccccttgatctgctcaaagcccttcgggggtcttggactgttggggattccaggatgcagacagcacatcagaggaggggccagataaggagctccactgcctcatgcctcagttctgtagatggggctccatccctccagggctcaagaagatatttgctttcacatccatgccagcttgtcaatacctacccatggagacctccctgtgccaacacaatgagaagcacatggaacccagagaagcctgccctcaagaaattcttctgagcaagttctgtggagtcctgaaagagcagagacttctaaaccaaacctccacggcctgactccacaagtctttactgagtgtcctttatgggctgggtaccatccaggggctgttggtaactagcaaaacaaaagtttcattactgtttatgtttcggggagcagacagaaggtcttaaacaacaagctacagcagtgaaaagacaagcacaagaaattgcttatctcatacactaggagggacactgagcttattagagctctcagaaacaatggacccaaagaaagcagagctttacaagcataccactcattcatttacaacagcagatgcactttatgggctgccattaattctcactctagtcattgtttttgcacctcatgcaattatctaaaacaatatttgccgaactttgacagtaagtcaagcataaggaatctgaaggtaccttcaaattagacagatttcaaggaacactgggagttctcaaccttctcagctcaggtgccaggatcttaggaagtgggaaagaccaggcaagagcaaaaggcagtctgatttggggcttgaatcatagtttgagaaatccaggcagcaagccatttccagatggaaattctggttcccttattgaagggaaaactcatatttctgcacaatattgtccttctgtttaaaaggggctcatgatttgtttctacaagataacagcaatgaagaagagataagtgatttctgctctccgggagttttgctaagtgactgtgagaccccaagaaagttttttttttaattttcctttaactactgtaaacctgaatttctgcatctgtcaggtagaggcctttcgtgatgagctttccaaggatctgctcctgggggttaggcactcggaagatacgggtacagacaacttctttaaaatagcacccatgcccaggctgggcatggtggcttacgcctgtaatcccagcactctgggaggccaaggcaggcagatcacttgaggccaggagtttgagactagtctggccaacatggtgaaatcctgtctctactaaaaatacaaaaaaaaaaaaaaaaaattagctgagtgtggtggcacacacctgtagtcccagctactcaggaggctgaggtatgagaattgcttgaacctgggaaacaaaggttgcagtgagctgagatcgcaccattgcattccagcctgggtgacagtgagactttgtctcaaaaaataaataaataaataaataaaataaaataaaatagcaccgcatgcccagttggagggtattctacatcctctgttctgacatctcattaatgaacaactcatgaaagtgtgtgccagcccaggagttgtttagtaacccaggccaggactatgtctctgtgtaagggtccttccacaacatcatctttaaaagaatcagctgaatcaatttaccaaagaggtttttaaagataatactcacagttgatgagcatgttttgaaataggcactcccattccctgctggcaagatatgcaaattggcacaatttctctttaaatcaatttggccattcaaatcgagaatcttaaaacatctgtatcttctcatctagtatacatctaggaatctagcctaaggaaataatcaaaaatatttgtgggagctgaggcaggagaatcgcttgaactcgggcagcagaggttgcagtgagccaagatcatgacattgcactatccagcctgggcgacacagtgagactctgtctcaaaaaaaaaaaaaaaagaatgaaaaatggtatagacatttagtgtaattgttgttgtaattatagttggtaagatatgtttacttcatttttacttcatttatacatatatatgtataagtacataaatatatatgcataaatgtattttatttatacatatatgcataaatgtatatatgtataaatgtgtatatatatgtacacagtcacggattactttacaacaggaacgcattctgagaaatgcattattaaataattttgtcattgtgtgaacaccatacagtgtacttacaaagacctacatggtataacctacttcataccaaggctagatggtatagcctattgctcctaggctataaacttgaacagcaggttactgtgctgaatactataggcaattgtaactcagtggttggtatttgtgtatctaaacctatctaaacacagaaaaagtacagtaaaaatgtagtattataatcttatgggaccactcgtgtgtatgtgtgtgtatatatatatatatatatatatatatatatatatatataccatccatcactgaaaaacaacatgttgttatatggtgcatgagtgtatatatagagagacagagagaaaaacttgtaaaaatactatcagtggttacctttggtatcgagatttggggttcgctctgagtcataggctcaccctagggcttgggagacagggtgaccagaaaaagggaaacacattcgctaaactaccaataatgccaacaatgattgtgcattatagagtaatgaatcaggctcagcagccttgaaagatgaatatggttttgtcatgtaaagcagagacttcagattaaactcaggttaaacttgcagtttatcttcacctcctaaacactactaaaattactataaatggataaaacccatggggtcaaagagatcaggaaactagattatagcaatcaagttttggaatctggaaaacaaagacaaataaagcccagcgcttgcccagagagaagccaagaggcaaagcatatttacactctggaactttttaactctgaatttttaagaactctggaaactctctggaatagggggcaccaggtacctctgacagtgaggaacaagtgaactagaaatgggagggtgagctagagatctgtataaaaagcagagaggcggccgggcacggtggctcatgcctataatcccagcactttgggagaccgaggcaggtggatcacgaggtcgggagattgaggccatcctggctaacacggtgaaaccccgtctctactaaaaatacaaaaaattagccaggtgtggcggtgggcacctgtagtcccagctactcaggagattgaggcaggagaatggtgtgaacccgagaggcggagcttgcagtgagccgagatggtgctactgcactccagcctgggggacagagcgagacaccatctcggaaaaaaaaaaaaagcagagaggcccctgtagctcctctctcccctccttgtctgatcccaaccactccacgattactccaggagaaactagatgtttatgctggagaatttccccagagggactctgaatcctgagacaccaagaagggccaataaactataatcaattagtaacagagtagctgagactgagaccttctctgcccccttcccgcactcagcttccagaaagctggtagcttttacaatccagacagaaaattagaggtattccttctggggaagaccctacccaagaaaagtcctacagataactgttccccattgaaacgcttattctccaccagattactctatactgagacctatcagtggcaagctcccatgctatccacacacatatacacatattccaattagtttctcagtgacttactcttaaatatgaacgactaccaaggaccactagacatctgagaaaagcctctggcatgaaagatggaggcaagacaaacagcaagaaaggaactgaggaaactgagccgatgacagaaatagaagcattgctggagccaggactaataggctcaaagagatagagaaactattgcatcttgaaacaagaacaagagactgttgaaaaaacatgcagagctatgagatatgaaaaatataaaagactgctgttgtttttaagacaggatctcactctgttgcccaggctagaatgcgatggtgtgatctcagctcactgcagcctcgacttcccagtctcaagtgatccgcccacctcagattccctagcagctgggactacaggcacaagccaccacatccagctaatttttgtatgttttgtagagacagggtctcactatgttgcccaggctggtctcgaactcctgggctcaagcaatccaaccaccttggcctccaaaactgctgggattacaggcatgagttgctgtgcccggccaaatacagcagattttttaaaactctgaataatggagttagaggtcaaagttaaagaatttctcagaaaacagcaacaacaacaacaaagaaaagacaagatggaaaataaaacagaatacccaggaaaaagagccatttcagaaagagagaaaatggagggaggaaatcatgaaacacgaaaatttgccagaattgaacaacatgagctcccacattagaagtttctgctagagtccagccggtggatgaagttacagctgcatcaattcaacacatggtatttcagcctgctggagagaaagagaagaactgaaaagcttctagggaggagagtgggaacaggataataagaaatgatctcgagtcaacgtggcataagacttctcaacagcaacaccagaagccaagaaacagtgaaactgtaccttcagacgctgagtgcaaatgatttccaagctagaattctatacccagccaaactatcagtcaagagtgaagataaactgaagatctttttgacacaaatggtctcaaaaaatttaaccccgataactccctttccaggaaactacttgaggatgtgcttcactaaaacaaagggaaaaataaaaacaggaaggaggaagacattggatccagaaaacaaggaatgcaacacaggaaaaagaaggaatttcaggatgatggtgaagagagattccaggatcacagctgagcagaagacccagacagcacccagaacagacaagagcaggacagaaggccctaggagacacatcttcatgaggatgaaattgatagaacacccagggttctaaaatactgaggagatttatacttccagcagtgaatcaggaaacaaattaatgatcaatacatagaaagtttaggcaaattgaaaaggagatatttattccaaggaaatttaatatagcataaaatgtaacatagtataatatatggtttgactatgaataacatttaaatagtcttaataatgtaaacatttatctaacaaaaatatgaatatattgagaaggtgggaagaagatatttaaaaaagaagtgggcaggcacaatgctgtataacagatctacatcctcatccttcacagccagaagtcaagcgattaaaaactgaaacacaaaaatcaaacagtaacaaggtaaagcctgttatttagaagtaaggagacaaatcccaaaagaaacagctgaagttgaaagggggaggcgggaacagagctgtgatatccagtctggggatggctttttcattaaaaaaaaaaaaaagaagaaagaaagtcttattcacaatagcaaagacttggaaccaacccaaatgtccatcaatgatagactggattaagaaaatgtggcacatatacacattggaatactatgcagccataaaaaagggtgagttcatgtcctttgcagggacatggatgaagctggaaaccatcattctaagcaaactatcacaaggacagaaacccaaacatcacatgttctcactcataggtgggagttgaacaatgagaacacatgggcacagggtggggaacatcacacatcggggcctgtcgggggtggggggctgtggggggatagcattaggagaaatacctaatgtaaatgatgagttgatgggtgcagcaaaccaacatggcacttgtatacctatgtaacaaacctgcacattgtgcacatgtaccctagaacttaaagaataaaaaaaaaaaaaaaaaaagtcttggctgggcgccatggctcacgcctgtaatcccaacactttgggaggccaagacaggcagatcacgaggtcaggagatcgagaccatcctggctaataaggtgaaaccctgtctctactaaaaatacaaaaaacaattagccaggcatggtggcaggtgactgtagtctcagctactcaggaggctgaggcagaagaatggcatgaacccttgaggtgaagcttgcagtgaaccgagatcacgccactgcactccagcctgggcgacagagcaagactccgtctaaaaaaaaaaaagtcttatgatgttgtacatacataacatttttttaatttaaatagttaaaacatggaaggcatccaggaagaaggaacggcaactgagaggtatgggccatatctcagtcaggtaggggtgactcaggggtttggagctgggaggggcaggaggacaccaagctgagttgagactgaaggctgagtgctgcaggggaatgggatccatcgcaggctgttaagcaggggggtcctgatctcacccttgttcttgatcttgaccacattctggtggaaatcattcagtggaaatttaatgtggatgagattgactctcaaaggggacccagttaggctgtgcccaggtctagggagagaggaagaagatctaaacatggcaatggccatggggcagcaggtgtttcctagggtgctcatcagcacgcaattcaccagctgatggaaatgaggaaggaggagttgatggggtgtgaggagaagcaggctgggagaaggaggatttcaggtctgacgaggacactgttcttaaggaagaaagaactcccttccaccctccagcgtagaaactgtgtgcagatgtgggagagcccatgggtagagttaagattcaagcatgggagtctttgggttaaaatacctaaaaaggtagagtggtgttaaaagaaaggcatggactttgcagacagacagaactgagtttgagctccagccgtgccacttactatctgcatgattttatgcaacttactgaaactctctgaattctgggggttgtcaattccaaaatgggcctgaccatacccacctcacagggttgcaaggaaaatatcataaataacctctgtagaatgcctccatggtgtcagtcaacacgtgtggacactcccccatcctgtgtcccacctcccacttccatagagcatggaggtcttccaggaagacccttcaagatcttctgagatttgtcccatttcccacatctctcaggctgtgaggctccagaaggtttctggaaagcacctgcaactcccctcccatcagttcaagaacagagatcacacaggtttgcatcaaccagaaagtcagctttattagcccaccaccagcagaggagcaggggagatagctgggaactgcgccaggagagcagggtcctgacccgggccttcaggaggtgaggccagctggtgggcaggaggctgtggtagaggcagctcagttctaggagctctggccctggctgaagctggatgagctctgctccttgaggatgggccgggtctgacggctcgaagaggacgaggaggaggtgaagactgtgggagagagaagaggaggtgagaaggggtctgagagctaagctgactccagggcagggagaagggagggctgggagctctgaggagaagggcccagcccccactccatggaaacaggcagaggggctgcagtgccggggagcctcagaagccttaccctcgcgggaagaataggattggccagatgcttgctgggaggaaaggctgtgggagagaaaaagcagggcagtcagttgtgctgagagcagcaggggggctaaagggtctgggaggcagaactgaggggcctgggactcactgggcatcctcgccctccagcaggcggcggtaggtggcaatctcctgctccagccgcgtcttcacatccagcaagatctggtactcctggctctgctgctccatctcacagcgtagctgggccagctgctcctccacactgccaatcagtccctggatctgggacagctgcatgcagtagcggcctttggtctcctccaggctgttctccagggatgctttctgcaagtgagagagagaaaaagagtccatggaggtggtcactcctgttcctccaggtctctgggcatgttttttgagagatgcctggattttgatcccagttggggtactgatgggccagacaatatggagaaaagctagcccactattctagggcttagtttctctatctatataacggtcccatgagtcccctggtcccatcctgagaaaagaaaggtggaactagactgtggctttttgagggggtggtggccattactggtgacttgggggctgctgctgtgctgggtccttcataccatgctgagctgggactgcagctcaatctccaggccctggagcaccctccggagctccgtcacctcactgcggctgctctgtaccagttcgctgttggaggccacttctttgttcagctcctcggtctgaggcaggaaagcagagtgaaaggtgaggctctcccaaagcccccagctgggaagtgctgcaggctcactgcgggcccgagccccaccttgctcaggaaccaggtctcagcgtctctgcggtttttctctgccatctgctcgtactggtcacgcatctcattcaggatgcggctcaggtccacgccaggtgcagcatccatctccacgttcacatctccgccggtctgacctctcagagcaagcatctcctgggaagggatggcaggaggcggtcagttcagcagacttctctcctggccctgggtgcatctggcaaccccaccaaaccagcctcccaccccggaagccagcagcgaccgtacctcctcgtggttcttcctcaggtaggccagctcctccttcaggccttcgatctgcatctccaggtcagtcctggccagggtcagctcatccaacacccggcgcaggccattgacgtcggcctccacagtctgccgcagggccagttcatgctcatacctggcaggacagaggtcaggtcctcaggctgcagccctgaggattctgaggctcggggtctgctggccctgctgggtggaccgccccactctttgtcccttgccctctgcccccagcccaccatgctggctgctcacttggtcctgaagtcatcggctgccagcctggcattgtcaatctgcaaaatgggctgcgcattctcaatggtggccgcaatgatctggagtggggatggaggacaggagccctggtcagccaaggaccttactacttgagcatgaaaggcagaaaggggcaaaaggaaccgccccaaatctggaagtcttctggctggcagggctggcatgccttctccaccagctcaggctacgtagggatgcactccatcccgatcacccccttcctgggcccaaggcagggaagctgaacttgcagctgaacccttgaaggaaataagagatttagggtaacagccccagtccgggcacagagatactgaaaagggaccctctgctaccacttccctgggtgatcctggccactccccaaaggtgcccagtctccctgtttgtaaagtgtaattgctaaaaagaggtatcccaagggccactgtagccccagcctctctcagtgctccatacaccaaagtcacccaccttgttcctcaggtcctcgatggtcttgaagtagggactgtagtctttgatctcactgggccgctgcctctggtaccagtcacggatcttcacttccaggtcggcgttggcctcctccagagcacgcaccttgtccaggtaggaggccaggcggtcattgaggttctgcatggtcaccttctcactgcccaccagaagcccatcaccaccagcaaaaccaccaccaaagccagcacccaagccaccaccgaagccagcaccaaggccaccaccatatcctcccccgaagccactaccaaagctgctgctgctgctgaagccaccgccatagccgccccccagcccgcaggctcccccagaggagaagcgagaggagacagacaggccgcccccgtaggtgctgggggcacggcaggaccctccggccaggacggaggagatgcggctggagccgcccccgatgccgcctccgatgccgcaggagcccttcatggagctggaggaggtgaactggcggctgcaggtggtcatggtgccaaggagggaggtgagcgagtgagcagttggctgaaagaaggaaaggtgctcaggaaggctgagagcgtgctgtggctgcctccaaccccagagacctttatatgcagctggggaaggcggggccctcctaactgctgactccaggttcccctctggatttcatcactcccggtcccgtccaactcctcactctggattattcagcccaggatcaactctgctgtgtgccggctcagagttcccacccagctttgggggtgtggggccgagagaaaaacacagaaatgcgagttcggtggtgactcaggctaggcggtggggaatcaggctccctttcctggagccctcggggccagtcgggccttggcacaggtggctttgtggcaactgcgtccccaggcagtgagtcagcccttcagaagaactccctgccccacagtgacagccttggctgaaagagagctcagtgatgccatcctgggctgtcttggggagcagttgtggggatcccacatgtcccactctgggcaggggcagagttcctgtcttcactctgcttgctgtgtggcctgaggctccccacctcccacctctgggcctgtttcccctcagtgaccaggctggactgggtgactgcagagtcccttctgttctaaaaatcctataactctctttcccctcttggatctaattccagttccagaggctgccttgagcccccgggatctccagaagtgtgtgcaccatacaaacagcactggccatggagctagacaggcggcactgagtccctgctctgcccttaccaactgtacagcacaggctggtcctatagccccttggtcctcagttttctcatctgtaaaaggggatgacacaccactagccacaaagaaacatgcgcgaaggaccccaccggcccttccccgagggccagccctgcccctcagcctccccatcctgcccctccagccacctgctcctcacactcacctctacacactggcaccatcccgcacccctaagcagggccctgcgccccccacactcccagctgaagaacaccacagccccacacctagctctgccactcctctaccgccctctcctaatcacaggcaccccacctgcaggctggtgggagggagccccatcctgccactacagccaggtatgacccctgaccccacctgggcctcagagtccccccctaccctgtagaaacaggactagccggggatccgttcccagcagttctctctcctgtgtccacagatcccaggctaggcctggcagctccattcatccagctgagctgggggagagcactggttatgggcccactcaggcatgcatggagagcccagtgtgtgccatacagttctgtgagcgtagagattcactcaaagtcactctgctttaagctgcagagctgcaactagaacccagaactctggccctctccaggctcccaccatgcctgcaggcggggccagtatacccaactctcacccacctccccacgatcactggcaggaggtctgcccatggtgggcatggccttggcctgagagcctggtccagcaccgaggactggagggaggatggaggggtctgggcaccaagacggggcctcctcagggtgctgtggggcatccctcggtgctggccactggccttgctctgcagtgtctctgttgaggtgaggagcccagagacagcctgcttctgcctgagctccactggggcaggcaattccttgtctcagcagaaccagggttttgtcactgctacatctcccctggtcattcatcccagaggtaagagcagaacggatgcacatcccttcagagtcaaacctgggagagggaacctgacactcctcacccctaccccaaaaaggggcaaaggggaccccggaatcttggacaaaaacctcagtgttcaggtgtcaggttgggcctggagttctggtccatccacagacccatcaccctcagaactgaaaatggtcttcaaggtcaccaaaggctattaataccccaactggagagagcgaaagccttatccaggttaagcagcacaaaagtgagagagcagagactcgagccagctctaactcccaagccaggattcacaccgactctcgtagtagagtctctgagaactcttcactctctgcccccatcgtgtgtgcatgcacacacacccctttctcattggctcactgccccccaccaagttccccattccaggaggtgtcagggcgggattatacacaagcccagcactgcagacctggggatctgcatgggctgagaagctgcaggaagttgctgaccaacgcgccaaactgctcagccaactccatagatcacgcacctgctgtgtgtacagctctcgggggctgggggtgaagagggagatgatgacatagtctctgaccttagaagaacttatcatttgaccctggagggaaaactaatgctggaaaatacagaacctggctagaaaccctggggtgctgggcttgcctgccatgcccacaccacaggaggcagctggggtaggcattgccccgctgagcctcagcagtagaggagggggctgccctcctggccttgatccctgaaagggtcctagcagagagaggcaccagcagggcctcagaggatctgagttgacagaggaggaggaggaggcgtttcctgtgcaccagtgatgcacacctgccccaaggtggccaagagccaggaccactaagcctggtgagcacagagaagcccagtgggcatcctccaggcagaggattcctccccacaccctgcctccttcctccctccttcgtactgcccatgtcaagcatgaggcatgagatcatggcatacctgaggcagccgggaaacaccattggccaatgccacgccttgacttgcagtgattctccaaccagacagatcgtcagagtccccatgaagatttgcagccctgctccaactcccgcatcagcaccgctcaggacaagcctgctggtggggctgttttacaagctccccagccaactcagactgggaaggcaggaggcagcttgggggctaaggaggggggcagagaagctgaggggagagagggggctgctgcagggcccccagcctcgggtggacaagccagagccacaggcttcagggcaggaggaaggaaaagtagagccccactgagccaggacagagcagcctagaatcggggcaagcaggggcgaaatcttgggcaggacattcagcctctctgagcctcagtttccttctctgggaaatgggaataacagccttgcctcacaggcatattaggggattcgaggccaaataaataaagcacctggaaaaggctggtggctagcgttatgtttatgagcaggtgtttataaagtgcctactatgtgcctggcactgtgctgggcactcagactcaaagaacaagacagagaagccctggagacacagtcttctgggggagaaggtggtaaagacaatcccaatacactaatgtcaggccacgatggggtactggggccctgcagagaaacagagagagcagggtccctgggggagaacaaatgtccaggcccaggctctgcccctgtgacggctcccgggatctggggaaatctgtgagtgccaggcccacctctggggctcctatcccctcctgcatgtttgatgccccccttctgaaggtggggctgtcatagcccttcacaatccaaccacagatctgcagcttctgccttgatgatggggtgaaacattctgtgcattgggcagggtgggtgtggacgaactgtgagtccctccatgagtcccatagctgggtctccagtccagcccaggcacatgtcctcagcagcctgggcccacttggggtgcctgttctgcacaaacaaggagcccggactcctgtgtgagtctcaggaaacccacaagaggggctcccattgcccccaccccaggaatgtgagcaggaagctggtgcctccagggaaggctgcggaccccagggggttgtgggagaaagagtgggcctctctcagggatgtttcttcaaatggtcactacagctcagggtgaggacgggcctctgtccagctcagttatcccctcagctctgtgcatggggggagacctgcctggctctgttccctctgttcccctcatctccccaaaacctgggttgccacaagagacccacactgcataaaggctgagggactgttttcagtccctcaggtcccctcggggcaggcactatctcttggggtcaggaccggtgtctcctccttcccctggcaggatgtcctgcagggagatggatgtagtgggggacactcatctccccctggacatgctaccaggtcagcccctgcaagggggatccagaggtaggctaccactggcatggacctggcctgagaatcatatgtgtgtgtccatcactcaagaccaggtgtggcagctccaagggcaaccacagatctgcagcttctgccttgatgacagggtggaacattctgtgcagtgggcagggagtgtgtggatgaactgtgagtccctccatgagtcccatagctgggtccccagtccaccccaggcacatgtccccagcagcctgggcccacttggggtgcctggacagacaaagccgctcaagtctccccaccatcccctggctcagctgtctgggcacaccggggggctcccccattctggcatcctgagccccccacccactcactttgtggagaagggtttcttccccagcagaggggcacagtctggggccgtctctggtcctccccacactctgacccctcctcacttgtcccatcagtaattgtggaccccaggatctacagaggggagagagagccctgcctggaacctgaggtggggcaggaggtggggctgggctcctcttcccggcacggaagcggggcccactcccctcccgtgcctgtctccactattgaccccctaggctccgggacaagggctgagtcactgctccttggagcctcagtgtccccatccacacaacgaggtgccttcccccaggccctccctgcttcctgggactattcagataaacgaagtcaccctccggaatgagccatctgcagcccagggctggttcttctggttgtggcgggatgtgtggtgggggcctggtgcaaacagtgcctccctcctgccctccatggcgccacatttgctgccagacaacagggagacgtcagcctctgatggagcagagcctgcccttgctttcagtcgtgcagatgccgctgcaggtgcgagtccccgactccaggcagccatctcccctgcagagagaaactctctcccaggatgtcttagctccaaggtccagggagggcctgtgaccagcccaaagtcacccataccccagtggtcagtacccacccccatccctggcctctgccagtcccaaacccccaccaacccaggctcagagggctctggtcactcccattttcctcaggcctgggcccaacccccagcctccaggcacgaggagagagagggtgtttgggggccctggtctgattccgcagcagcagagacaccgcaggtccagcagtgatgaggtggaggcaacctcctcctcccacgaaccccctgcttgaagaaaaccaggaaagcaggccaacccgcctggcagtttccggatttactagaaggaagatttccaggtgtcaggctcatctcccacagactgttccccacagccacgtttgctgccaccagcaagagctggggttggtcagctcagagggtgccgggagtggctggagcaggactgttccttctcattttcccaggaggcagtttctaccctccctcacgccacccctgtccctagtggggaaccaaagaggacccagactgccagggagagtggcactgctccctgggcacagccaccccatctgcagtgcccccccactccaccccgtccccatcccgagcaacagctgaccatgtgaggaagcatccctgagagaggccccaccctttctcccacacctgcctggggtccgtagccttccctgaaaacgccagcctcccactcacattcccagggcggaggcaatgggggcctctcttggggatttcctgagactcacacaggagtctgggccccaaccacccagcctgcctcccccacccaccctccctttgtgcttatcccagcccttgcccacctcctgccccatctaggggtagggcacggcccacaggaccgggaggaacaactgattgagtgagtcatctctgaggattcaggctcccacacctgagatcttcccatccgtttatggatgagaaagcaaggctcagtgaggggaagtgactgcctaacttctcgaggtcacagagctactcacagggcaagcagtggccacctaggaccgcacctgatacaccaactccaccccaggtctagcgcagcctggaccaccccctgaaaatctccagcccttgggagaggcaagcacccccttccaaactctccccagacttactctttatgccggtctaagctgacccctgacctgccaatcaacaacggtgggtctccaagcaccatctcccctcaccctcactccttcccatttcacccttttgtccctagtccccacttcaggggccagaacaaggacacatttcatagctgagtcaacaagctttattgtcatcaggcaaggaagcatggggaagggactgaagcagggggctgaggctggagaggccggagactgtggggcagatggggcggctgcctccctgcctcctgggtggccggccggggtagctgagtcctcagcgggtggtctggtggacctgctcgcgggaggagatgaccttgccatcctggacctcttccacaatggtacgcacctgacgggtggtcaccgctgcaggagaagcaggcaatttaaagtgggtaggggccaggaggccctcgcttgccccctagccctcatggacaggagccggctctctccctcatcctcccccaggtgctgtgagtgcctccactggcacctcgacatcacactgcacacacatccctcctgtccctgccaccacctcccttccatcccatccctctgccggtggccctgtgtgagtcttgcctccccagatgggttatttgattctgatccagtgtgtcctgccagggaggagccatgtagactccatgaaatccgtctccatttctctgcagtctctaggacatagattttctaccatctcccccatcagactgggatcgccaagacaaaaaccaggcccctatctcctccattagactaggaaccctaaggctaggatcatatattctccatcagattggaatttggaggacaaggaccatgtccctatctcccatcaggctacagaccccagagacaggactgtttttgctcatccaaaagctgtcaagagcaaagatcatgagaccatgttcctatcttcccatcagatgacaatctccagagctgggacctgtctcctccatcagactaggatctccaaggtaaggaccagttccctgccccacccccatcagaccagacagtgtctctctcatttgatcttttcctgagtatcaatcctcagtgctaatgagtcacttctccctgctgagggacagccatcaactcctggagctcctggggaccctgccccagcaacgtgcaggtgggctgcctgtcccatgcacccaacccccagggccgaagccacgcagatacttacgttctttcttgtactgagtcaggctgaaagaaaaaaaaaaacagagaggaaattagatgtgggtctgagagccccacccctgccaagagacccccagccctgaccccaggcgcccccactcactgggcatcctctccctccagcaggcggcggtaggtggcaatctcctgctccagccgcgtcttcacatccagcaggattttgtattcctggttctgctgctccatctcgcagcgaagctgggccagctgctcctccacgctgccaatcagcccctggatctgggacagctgcacgcagtagcggttctctgtctccgccaggttgccctccagggatgctttctgcaggagggcaggaagaccaggggtcagtgaggatggtcaatgccctcttctgggccctcccccatgcacaggactgttcctaccatgctgagctgggactgcagctctatctccaaggcctgcatggtgcgccggagctccgagatctcactcttgccactctgcaccagctcactgttggtggccacctcgcggttcagttcctctgtctgcagacaggacacaggacagggcggtgtgagcctggatccctctcccaagtcaggcctcctcccaaatctaactgtggagagagtgtgccttctcaccagcttcccacatcccaaagcccagaaacatgccatttgaaatgttaactttttatggttaatcccagcgtgtgggaggcacagaccggaaacttgagaacaagccagaacatgtagcctggctcttgatgctagttcctgacttcttgagggagacgtggggactcccaaggtctttaccctctgcctttattctgagggagctccctacctccccacccacccgccagatcccagcttgagctcagctccatgtctgttgatgcagtgggtgaccctgtggtccatgcagcttactgaggaggggcacctccaagacatctggccgtgggcttactgtcagtgctaaggcccctgagccccagcccctaagagagccctctggcctgcagcaccccccaccttgctgaagaaccaatcctcggcatccttgcggttcttctctgccatcttctcatactggtcacgcatctcgttgaggatgcggctcaggtccacgcctggggcagcgtccatctccacattgatctcaccacccacctggcctcgcagggcgttcatctcctatggaaaaaggggatgtggatgtgcgcatctggacccatcctgacctctcactcccaagccttcccccacaaggggaccccacttcccacaaggacccctcctttgttctccctctgctctatctgaccctctaaatgatttttattcatctgctcagtattgcctccaccatcagactctatctcccccattagaccaaggactctccaaaataaaatctaattattaggcctatgcccccaaaagttcccctctaatttccaagcttctatgtagatgttcagctttgagagtttgaaatgggacaagatttccttacttatcccccaccctcatgagggaggcagggtaggtagagggagcctctgcaggcccctgggaggttccttgtgtacagagaagcagtgtggtacaaagaggagtctgccctgcacactggaccccaaggatcagggctctgcagacagggaagccctctaaggtgactaatcccggtgcacctgctctgctctctcccacggcctcagccattgcccagccccagggctctgccacccactcctcagcatctttgaccttctgccccagccacctcacctcctcgtggttcttcttcaggtaggccagctcctccttgaggttctcaatctgcatctccaggtcggctctggccagggtcagctcatccagcaccctgcgcaggccattgatgtcggcctccacactcaggcgcagggcctgctctgtctcaaacctgccgtgggaatcagagacttcagcccaggctgcttggacctgcagatccaggtcctggctgctcacctgccttcattttgccaggactctaaggagttggaagggctgatgagagggtcgagtggaaacgaattccagccccgggaccccgggaccatcacagggccagatcccacgcccaccagcttccttacttctctctgcctcccgcctcccgcctcccctccttctcttctattccctgcctaagctcagcaaccttcagaactggctgccttcactgcatcctggactaaggagtggggctcctaggactgccccaccctgagctcctgggccttgccacaagcaaccaaggaatcctggggtcaggaggggtaccctgagatcctccgccagctggcccaggctgcccaaggccacagctaggactcacttggtgcggaagtcatcagcagccagacgggcattgtcaatctgtagcaggatgttggcattgtccacggtggctgtgaggatctgaggagaagggagagtagtcaggtcattggatgggggtggctgagcccacaccagggttctgagcagatcttcctgcctcagggcctctcttctcgcccagcccctcccttgccccgtgctgtattattggcagaggaggggcaaacaggagtctgaagggctgaaaggtgcctcttcttcccccgatactcagtaccccaccagacccccatggcaggctcggccttaaaggagaagagacagctggctgggagtatgaggcaaccagaaaagaatgggaaaatgtccccagggcagaagctgtcccagaattctagaacaagggaggggatgtgggcaaccccctcgttttacagtcagctagagggtgcccctgacaggctcccccaaaaggaggctaaaggagccctcattaaagagtggttccaaatcaaaagtcaggacccctcctaatccctaaccctgggcgccagccagcagccccgccccctggggtttgctgagcccgtcttaagggacagcaggaggaaaggagaagccagaaaaatccccaaataaggcacatcagaggccttccccacactgaggtcccgccccctcctttctgcctcctcctgcagcaggtgctatcaggagctcactcagacacccccactccacatcacccaaaaccccctcctgttgacccctgctccaaaggagcaagacaccacacatccagcagcccacgggcccagccctccatctgcatcctcctgcctcatcctacaacctctccaggtggcggagctccacgagggagaaactgaggctccaaggggctccacaaggcctctttgttcctgactcagcttgctgtccccagaaaagggggatgtgagccacacaggggccccaaggcaggttcccagaagctaagccacagccaaaccacccttggctccctgagaccctatggctggactccaggcctttggccaaggcaggagttggggggaagaagtcatgccccccggagacccctcccaccagcaggccctaccttgttctgcagctcctcaattgtcctgtagtactggctgtagtcacgggcgggccccggggcctgcctctggtaccagtcacggatcttcacctccagctcagtgttggcctcctccagggcacgcaccttgtccaggtaggaggccaggcggtcattgaggttctgcatggtggccttctcacctccagccagcagcccatcaacacccccaaagctgctgccatagccaccaccagagccaaagctgtagcagctggagtagctgctacccccgagggtgctgcccaggccgccagcagatcccagcctgcaggagccggcacccaggccgccagacagccggcaggaggtgcgggacgagccgccccccaggccggaggagcccttgatggagctggaggaggtgaactggcggatggaggtggtcatggtggcggcggcaggaggcaggcacacaggagaagggctggagaggagaggggccccaagttgtgtagggctgccggggttcgcccgcttcctttataggccaccaagtgggcgtagcgattacaacaggcttgctcctctgtttccattcccctgggctttcatcaccactggccacctgccagctcccaggtggctgggggccccctccccgcccatcatcaggaatttgcctcatttctccaaatcctcgtgctgagtgccgtgcgtgtgcgtgcctctggtctcaggcccgtcacctgtgattcaggcgggccctccagctatgctttcccatgacctaatacggagaagaggagaaggcaggacgtcaccgtccccaggccctcccaggcagccaccaccccagcctggcccgcctcaaccctgtctggtggggaaatgggttgcagtgtcagctgacccccccgccaaagttgctgtctttcaccccacactgctccacccacggtgctggccccggggctgggtgctgaagagaaagaggagaccgagagcctatcctgccttggaaactgagcccaaacccaccaggcccacctcacagcatagaaatgccatcaagcctcggagaccaacccacatcacagataaagaaattggggctccagaggggtgccgtgtccacactggccccttctgcagagcctgacacccaggaatgcactctaggggctacagttccatccagtcagcttctgaccctgccccatccctagaaatccttgctaacccagtctcttcgtgtaaacctttccccaggtttacactccaggctggggtgggcaaacaggggctcagctataggatggggaaatggtgggctgtgccaactgagagggggatgcccccttccactcccctcacccttctgtaccccaagagacctcagggtcaggtgacgggtatttatctcaggtctcagcccacaggaaacctaaaggacattgcccaagaagaggctcttacagagaccccagccagcccccttcccactccaggctccccaagatgtggctcctcaggtgggccatgtgccccaccccacagccccaccctgccctgcccaccaccccaagcccggccctgggtcccagggtcccgccaggcccgctgggtggaatgtggtcatgtttcagactgccgatggcttccacttcccagacaggcccagacggccccgccagcagccgagagacattcctcaatagcccagtggctgccaagccaccaaagcaaacaggatgccccctacgcgtacacgcacagcggccaccccgccccacacacaccccgagctggggcagagccggtctggtttcctgggctggctgcgtcactgccatgccctctcactcatcaatgccatggaccactccttcagaagcccctccccaccaagcccctctccttctgctcttgaacccgccctgggctgaggcagggagtgctccccaacaggcaccatccttggaaagtctgtgtggccctcccagggaccagccacaggtgacagggactcaggggctgattcttagaaacttttcccaatacaaggggctgtcccatccctccacccttaatctttccgcctcctcccctctcatctttccaggagccccaggcctggatggagtgggcagaacagattggcaggtgacaagcccatacccaaacactcaataaactccacctcccccagtccctcagcccacactgccccaaaccaatgagcagatcagatcacacgaggcattgaacttggagcaaagctttaatagtaggcactggacaaacccaggaggcctcctcagtgaggggctgcagaaagtagatacagaaagacaacaggccatgcaccggggcccagacggacactcggggcgtggcagtagcatgctgggagctggagctgatggctgtgccgtggccctcgaggtggggctgtcgcagacagaaaggggtctcagtgggtggagaagtggacctgctcacagaagaagaccacctctccaacctggacttcctccacgatggcacacctggtggctggtcactgtggctgcaggcgatggaggagggaggcacagggaacatcaggcaggagctcttccccccgcctgcccccgcgtctgtggtccccccagtctcccacacagaagggtcctcagcctctcccctgccttggggtccacaccgcaggacagggcagcttcttaccttcccgggtgggctgcgaggccagggacaaggagtactgagtggccagcctgcagggagagaagcacccatcagcccagggatgccagccagcccaggcacctgcaagcactgctggggagaagtaggccctggcagaggaggttcccctaaattggtgaaaaatcacagttgggaatgcacagaaattagcgcaggcccaagaatgaaagggcaggggttcagcacagcaggaagaagaaaaagaaacagcacagcagtaggtctggcggcactctgtggctactcaccaggaatttacaaggagaagctgagcaagtggtttttccataacccagagggcccaacaaatagacccaattaaagcaggagagactgttgttagactatagatggacttcaccatttccggggagcaaaaagctgcaacgtgtgactaagcatggagactccgggacactctcagctgaaggcctgatcacccttcccaactgcaaacccaaccaccacccaccttgctcttcaccactcacacagtcatcagaaccagaaacccagggccatcaatgcctgctccttcatgtgttctcccgacacttactgagtcctgactgtgagccatgcttaccccgagatccaggcatccagtcccgctgttttgagctataacctctcttctgcgtgcaccaccttccttcccctgccccactacccaccaccgcacgggacttctctggccagactccctgctccagccccctgacacatctctctggccccgccctgacccctctgatccatttctccctctgcagccagagtgaatgttctaaaatctcttgatgttcatttcactctcctgctccaaatccctccatggctccccattgcctacgtgatctagtccagacgctttaacttggcattcaaggctcctcagccagactccagcctgcatcgtcagtatcacctcctgcaaaccccaacaggttccgacattcacacctcctgaatttcgctggtgctcagacaccaacttctccctgggtgaagcgggcccccagcccaccccaacaggcaccctggtacacactcactgggcgtcctcaacctccagcaagcggcggtaggtggcgatctcctgctccagccacgtcttcacgtccagaaggacctgtgcttgtggtcctggtgctccgtgtcgcagcagagctcgcacagctgctgctccatgcttctgttaagcccctgcagctgggccggcagggtcctgtaacacacctccatctccaccaggctgccctccagcgatgctttctgtgggccaagagataggtggtgtgatgagctggacctgggacccttccccatggcagagcactagagaggagcccctcctgtatggggctgtgggtgctgccagcacaatgaggtggtagtgcacccagccactgagtgtgaagggacaggctgggtggggactctggttccccaagcaggggtctacaaggctgggctcaccctggggtgacaggtacagggtggggaggggacagagaccctaccttgctgagctgggacggctcaggttctgcacagagacgtagagctccatatctctatccagccactctgcagggcctctgtgttggtggccacctcgcagttcagcccctctttctggaaggcagagtgggccacaggggtttatggagactttcagaagcggggcacaggaaagggctgctcctgaaccctcacctcccagaaccatcccctagcccctccctggcctctatggggccccaaaggcacctgcacacagagagcctctgcacccacattggaacttggaggaattcagcctgctctgcggtcatttgcatttctttttcctactgaactgcagcacctcaaagacaggcactgggtgttattcttttgcgcctgttgctgtccctaggataccggagatactcagcctgtgcttgccaagggtatacatatgtattcaaatacgcacatcctgtaaacagctgtggtggaaacccaagaccagacttgtagagacctggatctattttgcaggccacagtgaagggctgtgtgagcttgagtcctctctgagcctcacgttttacatctaaaacatgaggggctggtccaactggtttccaaaagtccttccaactgggacagcctgtggatctgccagtgctccagctgcaccagcatgcagcacatgtgcccacacgtgtacacacctgcttacgcacggccacccaccatgctgaagaaccagccctcggcatccttgcagctcttctccaccaatgtcttgtcctggtcacgcatctcattcaggatgcagctcaggttcactccaggcacagtgtccatcttcacactgacatcctcatccacctgacctcaaaggacgttcatttcctgggcagagaggacagcagaagctcacccaaggccatcctggagaaagaccctggggcctgccttctttccctcggagagacaggtacagatgacagacagacagacacagataggccaacagctcctcaccctgaaggtggaggtggatgttgtcatttctcaaacatacagggctgtgaatattagcaacctcccccaacacacaccgtgacgcgggactggaattcacccatccccaacaagtgctaagccccgagagatgacaaccccccagcacggtggaggatgaccacgggcgacctcactcactgccctgaccttgcccccaccactgccttgcccccaccaccaagcccacagcacaggcatgcagaaagcaaccctacgctgtgtcactgcgccaggccccgttagcaaatgttaatctgctggaggaaagcaattgtataaccagcctcaaagccagggggaaacaccttccgggtgtcctgcttctcggggagtaggctcccccagctcagagcagcacagagctcggctgagaaggaagacacaggacagggcatgtaaggcctcctgactgccccacaggaccttggatctctatccttgggttgagctttggagtccctgcgacctagagccttctggaaaggagaggcaggagagggggcagagaggtggggtggatacgagtccaacagacctgaaggagggtccctgtgcagccatagataaatcccttaacctctctgagcctccgtttcttcaaaggtcaaaaggaagtaagagtatctttctcccagctgttgtatcagctgagataatggctgtgagtcacttgtagtgctgggcagaagttccttgttttaatgactatcactattataattaattataacaagcattgtgttaattataactagcattgtgtgttcttaaactgagttactcattagttagttaactgcagtgagctgagcctcaagggacaaatgaagtctatttgggacgaggggctcctccaggcctcacgcagtgtcctctgagggtcagggctagtcatccataaaagacgggaactggactgaaagcacagcccagcccagggaggttctgggccccagcctcgcttgcttccaggtgaatttctgctgcgttccctgagctgacctcacctgcttgtggttcttcttcaggtagaccaggtcctccttgaggttctcaatctgcatctccaggttggccccggccagggtcagcttgtccagcccctggggcagctccagagacccagcctcacttggtgcagaggtcatcggcagccaggtgggcatcatccacctgtagccagcacgaagctggaattaccgaccacagccaccaggatctgggagagacggggtctccatgagaaaatgcccttggcagcctccaggagaccctccaacacccttcttgcaggcttttcggaagtgagccagggtgagggtgatgagagtccccatggtcttctctgagcacccccctgggaacttctggggagccagggtgagggtgatgagagtccccgtggtcttctctgagcaccctcctgggaatttctggggagccagggtgagggtgatgagagtccccgtggtcttctctgagcaccctcctgggaatttctggggagccagggtgagggtgatgagagtccccgtggtcttctctgagcaccctcctgggaatttctggggagccagggtgagggtgatgagagtccccgtggtcttctctgagcaccctcctgggaatttctgggacccagccaaggccctcagggggttaaaggatgatgggggtaggatgcccaggcatgggtaaacatggatgccaggagagagacccttatgcagctgtctcccaccatgggggtcatggcctaagctgcctaggcctcactccctcttccccaactaaattcacctctaggctcagctgccacctcctccagaaagccctcttggattccctttctgcgtctcttttccagatcatacctcctcccttctccaggttgtgaatttatacctatttctatgacttttttggttatttcctcctccactggactctgagctccagggagacaaggccatgtctgtttcattctctttggaatccccagccctgggcacagtgccctggcccagagttggccccaagggttcgttagtttaattaagtgatttgttaattaattaatgaggttatgactggcctcacctcaaacccagggcaaagctttcttttcccacaaggtcatctgggcggttccaatgcaaacacggagggaggggcccagaaggagcagaaggttggttgtgattactgccgctgtcattggcatggttggaaatgcccaagagggtttccaattgaggccatgggcatgcaccaaagagtgaggcccctccagccacccagaggttgaaacacttgtgaaggcggcacatgagcgtgtagaatctggaatttgctgaggctcagggctgactgcacatgaccttagagggataagccccaggacaccctagtagaccctgcaggctcatcctgtgcaccccctccccaagaccccactcgaggccctaagttctgtgaagtgaccctgggtcaagctgagctgagggccagtttgttcccagcaccccctcctctgcctcagtgggcccatctgcatccggcagagacccacccagcccccatctccttgctcgggaggctttgggggcacagcgagggtcggctgtgaaaacacggagagaatgcgtgtagggtgactcgaggcacagccctggtgcgtgctgcgcggcggggttggtgatgaggtgctggctgatcccgaagatcaggagcactgactcaccagggctcccctgggttccccgctgccagaaccaaccccaatatctgatctggcactgccagtatttctgcttccaaggggagattgcaggaattcccgcctagtggaggtcccgggcaggagcagacaaagcccctcgtaggcagcaccaggcctggctctccacccaggaaactgagcaggcctaaccaccagggccagctgggcctaacctgactcccgcctgcctcccctggctcccctggcccccctggccaccatactcatcacttgcactcctcacctgccactggtggctttgctctgtaggaccctccagggcagggtttgtgcagaagacaaagtggccatgtttacagaatgccaaagccatgttcttagaggtcatgagagagagtgtgtgtgtatgtgtgtgtgtgtgtggtgtgtgatgtgtgtgtggtgtgtggtgtgtgatgtgtgtggtgtttatgtgtatgtagtatgtgtgtatgtggtgtgtgtggtgtgtggtatgcatgtggtgtggtgtatatgtgtgtgtggtgtgtatgtgtgtgtgagatctgtgtgtattgtgtgtgtggtgtgtatatgcgtgtggtgtgtgtggtgtgtggtacatgggtggttgtgggtatatatgtgtatggtgtgtgtgtagtgtgtatgtgtgtggtgcgtgtggaatatgtgtggcatgtgtggtgtggggtgtgtgtgtggtgtctgtgtgtatgtgtatgtgtgtgtggtgtgtgtggtgagtgtgtgtgtgatgtatctatggtgtgtatggtgagtatgtgtgtggtgtgtgtggtgtttgtgtatgtgtgtgatgtgtttggagtgtgtgtgtggtgtttgcgtgtgtctgtgatgtatatgtggtgtgtgcgtgatgtgtgtgtggcgtgtatgtgtgtatgtgtatggtctgtgtggtgtttgtgtgtgtatatgtgtgtgatgtgtgtgtgctgtgtgtctctgatgtgtgtggtgtgtgtgtggtgtgtgtgcgtgtacgtgcgcgtgtatgtgtggtgtgtgtggtgtgtatgtgtgtgatgtttgtgtagtgtgtgatgtgtatgagtgtgtgtgtggtgtgtggtatgtttgggtgggtgtgtatatgtgttggagagggtgtggggggtttgggggggtgtgtgactaatatgtgtggagggggtgttgggggtgtggtgggtatatgtgtaggtgtgtggtatgtgtgtgtgtatgtagtatgtgtgtatgtggatgtgcctgtgagctatgtgtgaatgtgtatataggagtcttttagtgtgtgtgtatcgatcggtgggcatgcgcctgtgtgtgaatctgggagtgtgaggtgtgagtggggcgcgtggcgtttggggtagtgtgtgatgtgtatggtgtgtggtgtttgtgtgtgtgtacgtgtgtgctgtgtgtggtgtgtgtgtggtgtttctgtgtgtgtatgtgtgtgatgtgtgtggggtgtgtgtggtgtttgtgtgtgtacgtgtgtggtgtgtgtgtggtgtttgtgtgtatgtgtgtgatggtgtgtgtggtgtgtgtggtgtttgtgtgtgtgtatgtgtgtgtgtggttgtgtgtggtgtttgtgtgtatgtgtgtgctgtgtgtgtggtcagtaaggttctgcatggtcttttcaccgcccccgcagcagggcatccgccacgtcaacgctggagccaaagcccccacccaggttacaggtgtagccaccgctgtagcctcccccaagtcccaccaagaagcaggaggaggtgaccgacatgttgccacagctgctgactcccaggaggctggcgaaaggcacccccaacactgacagatgacatccaggagaaacccccgccaggtgtccacaggcccttgacagagccagaggtggagaactggcagatgctggtagtggtgacaaccagggtgtccatgggtcgggtgaagagtctggtctggatggagaccctgggtagcccgttacagccgggctgaagtggggctgggaccctggcccttgaagttcaggccaaaaccccaggagtgtattttgcctcctcccacccacccagggcctggggctcaggctggacatattgagagcctccccaaggacccctccatagcaagagcccagcctgagcaccagggcctcagcggtctgttcagacacaaaggtggtggccaggcacggtggctcacgcctgtaatcccagcactttgagaggcagaggcaggtgaaccacctgaggtcaggagtttgagaccagactggccaacatagcaaaaccccatctctactaaaaatacaaaaattagctgggcgtggtgtcacgaacctgtaatcccagctactcaggaggctgaggcaggagaatagcttgaacctgggaggtggaggttgcagtgagccgagatcacaccattgcactccagcctgggcaacaagagtaaaaatctgtctcaaaaaagaaagaaagaaacaaaggtggtgctggtctgtagccctggggtagggtgaccctccatcctcagccacagttaggaggctgagcttattcttgtggggagcccggagaacccagccctgggagccagcacgggcacaggacaaggctgcacaggccaggagccggaggctggcctggcccctcacccagcattccagggccctggggtaagggtggagagatcggggcctgacatcattgcccaggtacaacgtggccctggtggagactcccagtcagaggaggcagaattagcctctgacctgtgggagccccactctcttgggattcttccaagtccgcggggagatacagcccacaggttcaaggatccctgtgtctgagggaaatagacgtggccgctgaactgagggagctttggatccaagcctttcaggaagtcagttctagagcctccgttccctcgtttgtaaaagggggaccaagtcttgtctcccaaagtctttgagggaatctggagagataatgacgtcagtaaggctctaacaaaacaggaagcagaggtggggctgggagcaggggtctgaggccaaagggttagggcagcctccctcctcacccgaacctgagcaatgtcagtccagagcagtcccggaggaggggagggcagcccaggaaggccacagaggagcaggatctgtgcaggagccagcgtcatgccccgaggaacggcccctgcaaaagagcagcatgatccgcaggctggtggctggcaccgctccacccaacaaggagattagtatcctaatctccgcggcactaatgatttaggtgctgccaggacaccggcgtctgcaccaggcctgtctgaatgtggagcttcccagggcagccagggcccgcggaacaggagaggggagagaagtgcatgggtggcctgggctctctgcccgcatacggggacagggagggagttgggttttccatgtggcccagagctcccagatgagaccacactgctggaaagacttcctgctcagatagtgggtggtctctcacggaaagtgccagctggggactgtgccagctgggaatggcaggagctatctggaagagagcggttgagccctgattttactgctcccgcccagcctgtgaaggtgctgggcggggatggggggaggttcaaaaccaaggctagagagcaaggtcagaccaccatgagcacgaggttagacatctggaaggacttcctggcaatccaggactgtcttcggggaggagagagacccagtaaaacccgtgctcacctgagccgccagagtcaagactgcaccagcaggcactcacacacgaagagacacgaaaccaagaccctccccatccccatcctctcctaacaacccctcccttcccaggccccatcctcccctaggccagctgggctacccaggtgggcctcactctgggctcacaaaagggactgccccgccttccagcagcaaatgtggggcaaagccagggccctagggagggggccaggtcgtggggtgccaccacccctctgcctccccgtagagcccacaccgccagtgctcaccctgcctgggaaccccacttccagagtacccagaccttagtcttgaggcccaatttgaaggagcagagagtttattactcttctttctgcctctaaaatcaccaaggcctccaacccccaataccaccatttagcccccacaagcttcctcacccctgacaggctttgggccgcgagcctgctcctcttcctctctgggcctcagtttccccacgccactgaccccccccccaggcccctttgctactgctcgttagaggctctactgcctgtgaatccccctctagcccccaacccagagaagcctcacatgctgaggacaggccgggccagctgggccagccgggcaggagggcacagctcagatctcagcagagatagaagtgggaccccaggaaggcctccctggccctccagagcgtggggccactccctggccagggctaggaaaatgcaaacattcctcctgagaccctcacaacagtgccttgaggacaccaagacacagggtgcttgagcagcgggcagtcgggcaacccaatgttggcatcagagccgggcctgaagccagggcctcggcagctcccactctcccagccagggaggaaggcttgacaggggccggctggagggccacacagaggtcctctgggctgtggcacatcctgtctgggcctgtcctccacccccagcagggagagatccctggcacccgcaaggggcagcccaggcctgcagccccggcagcggcagcagcttggcccccatggaagacaaaggggtaaagaaggagaggtccaatggctcttccagccccagaggctgctggagcccagcgcaggtgggagagggggaggcccagggaggtggctgggagaacttgaagcttcccccagtgccctgggtgccagccccaccttgactccccctcagtctcctctgcagagagtgcagaaaagccagcatgctggagagcgcagcacagacaggacctgcctggaatttgagcagagctagggtttggggacagtgtcccctaatatcacccctactatgttgtggggaggcagagggcgtagaatgatctggggccctatggaaaggagatgttcaatagatgcatttttttttactttaaatagagatggggtctcactatattacccaggctggtctcaggctcctgggctcaagcagtcctcctgcctctgcctcccaaagtgctgggattataggagtgagtcaccacgcccagccaatagatgcatattgatattgacaaggttgacaaggtctggacaggatcagtggctcacacctgtaatcccaacactttgggaggccgaggcaggcagatcacttgaggtcaggaatttgagaccagcctggccaacatggtgaaaccccgactctactgaaaatacaaaaataagccaggcgtggtagtacctgtaatcccaggtagtcaggaggctgaggcaggagaatcgcttgaacccgggaggtggaggttgcagtgagctgagatcgtcccacagccctccagcctgggcaacagagcgaggctccatctcaaaaaaacaaaagaaaaaacaaaaagacaaggtcatgccccgtctgcccagctggccttggctcctacgagcccccgcaaggattaactgtcaacccttaggatggtgcccaccccataccccacacccctgcccagaaccagcgcgggctgtatgcagcaggtgctctgtgagtgcttgctgaattgttagggtcatggagcctgagcagtgactggggaggagacaaggtcccaggaaagggacatggccacctacccttcccctcaaggaaaagggtcagtatcaggtggtcagggaaagtgagaggccctggagcccagaacgggctcccagctgagaccttggcttcgctgatgaggagagaaccccagagaccctcattccacccctagtcccctgtcactaagacccactggggtcctttccattcacccctcagacacagagcccctgtcacctgcagggcccttggaggtcacagatctcctgcccctcgctcacccccaggcactcccacccctggcccagcatcgcctgagaagtgcaccctcacccagccacacctgccgcctccacaggtggaatcctgcttcctctattctgtttcctgcctctatcctgaggccccaggcggccccacccagatcctcccaccctccaccttcccagggccctgggagattcggaacattgctgggtgccctgagcctctgccccagtttgaagagacagaggtaaggggatcccccagcaccccctgtatacccagggcttggccaggggctcccctacccaggggtaagtggacccagcctttcttcccctctgcacccctcactcacctctgactggtttccaggaactgtcagcctgtggcggatccaagacgtaggatacggacacccaggaacaccccacccttccaggcagcacatcagctgtccaggggcccttcccaaaagagggcctagaggactgaatgcctcggatgaggcccagggcgggaggacagagcaagggagggagggagggaaggctggggaccagtgggaatgagtggggaggacatcacggacaggaaacccaggcctcgggggtcacccgtgggacacctcactgcctctcacagggtgaagactcctgtgagaggagtcttgaccagacggcttcgtccctctgtccttccctctgtctttccctccctctgcccttccctccctctttttcctccctcttttcacttcccccaccgcttccttggcctgagagatgcataggggtgagtgagaggcagaaactccagtgggttcccctttcaggctcacaccccctctccactctgccctgcagcctggctgagggcaacctgagggcctggggaaatgggagtcagagacaccaaggggactccaggctccttcccaccctgcagaccccaaacccccagctgcacctccctccccgacccagctaccagctcgctcctccctccctgcgccctggggaggctggtttctccctgttgatgagcgctcattcgcgcctgctctgcaatgctcttgagtggctttctccaggggcagatgaggccaggctccccaaaacagagactgtgtctcttcccttaaattggacacttcctcaaggtagcagccatgtctccccctcagattgggggctcccttgacataggagctctttctccctgatgtgaagggggtctctcaactccttgtcctggtgttgaccacccagcccaccacagtgtgacacacctgactgaccaacaagggaggagaagcagggcagggagcactgagggaggaggaccagggcagggaggactgctggaggaggaagaggggacggaggactaggtaggtaagaccagcggaaggaggaccaggggaagggcatgaggagagggaggactagggtaggaagaccaggggaaagaggaccaggggaggaggactgggggagggaggaccagcagaggaagggctatgggagaagaaccaagggagagaggactaggggagggaggaccagggaacgaggaccagagcaagccatcatctatcctttccaagggcaaaacaggagaacagggcaggagcattcctttgcagaggcctgggctccatggagtgttctgcctgagccccagcccgccatacaggcctgcttcctccatccaggaagctgagctgccctccagccagccaggagcaagctccctccactaaactcctgcagcactgtggtccctgccatctctgcctcagaacccagggtccctgggagccttgttattgagtgtttctggttgacgcacttttttcagcaaagtttcatggagagggaccagagtttctaatcttcacaaccacagggtcaggcattgtgttagctatgatcacactctatgatgtcatgcaaagagctccaagtccaagaacctggggtcaaatctggactcttgcccaacttgggcaagtcatttttcttcttttaggctcaaaccctcctcctctgcagaatgaaaggactagacttttttttttttttttgagacggagtttcactcttgttgcccaggctggagtgcaatggcttgatctcggctcactgcaacctccgcctcctgggttcaagcgactctcctgcctcagtctccagagtagctgggattacaagtgcccaccaccgcgcccagctaattttttctatttttagtagagactgggtttcaccatgttggccaggctggtctcaaactcctgacctcaggcgatccacccacctcagcctcccaaagtgctgggattatgggtgtgagccaccaagcccagccaggactagacttttgtaacaaactcttcatgagattaaatgagtcaatatgtagctgtcacaggccttgtagtaactagtgattcaataaagcttcggtgactccaaaagctggctgggcaaagcctccctgccatgagaagtcatcctgccctgcctgtggtaggcagaataataaaccccaaatatgctgggtgcgatggctcaagcctgtaatctcagcactttgggaggccgaggtgggcagatcacgaggtcaggagatggagaccatcctggctaacacagtgaaaccctgtctctactaaaaacacaaaaaattagccgggcgtggtggcgggtgcctgtggtcccagctactggggaggctgaggcaggacaatggtgtgaacctgggaggcggagcttgcagtaaaccaagatcgatcgcgccactgcactccagcctgggcgacagagcgagactccgtctcaaaaaataaaagctaaaaaataataaaccccaaatatgtccatatctgaatccccagaacctggaaatatgcaccttatagggcaaaaaggactttgcggatgtgaggctgtggttcacaagggatcttaacaggaaggagacaggagtcaatgcccgagaaggagacataaccagagaagcagaggtcagactgacgcgcggccctgagccaaggagtgcggcagcctccagaagccgaaaaaggcaaggaacaagtctctcctggagcctgcagaaggaacacagccctgctgacacctcagtcttagcaccctaagacccatgttggacctctggcttcagaattgtaagaggataaatgtgtgttgctttaatcccccaagtttttgataatttgttacagcagtaatggaaaatgaacgcactcccctagctcattctagcaccagaggtgctagcctctcacactcgtgttagaattattgggaggcggggccaggcgcagtggctcacgcctgtaatcccagcactttgggaggctgagccaggtggatcacctgaggtcaggagttcaagaccagcctggccaacatggtgaaaccccatctttactaaaaatactaaaattagccaggtgtgggccgggcgcgatgcctcaagcctgtaatcccagcactttgggaggccgaggcaagtggatcacgaggtcaggagatcgagaccatcctggctaacacagtgaaaccccatctctactaaaaaacaaaaaaaaattagccgggcatggtggcgggcgcctgtagtcccagctactcaggagcctgaggcaggagaatggcatgaacctgggaggcggagcttgcagtgagccgagatcgcgccactgcactcctgcctgggagacagagcaagaccccgtctcaaaaaaaaaaaaaaattagccaggtgtgatggcaagagcctgtaatcccagctacttgggaggctgaggcaggagaatcacttgaacccaggaggcggaggttacagtgagctgagattgtgccactgcactccagtctgggcaacaaagcaaaactccatctcaacaacagcaacaaaaaaaaagaattactgagaggcggatctgctccccttctcaattgataatcctttacagccaaaaggtggttttctgttcatctttggacctactacaaggtctgactcagtgcttcgtacacagtagttgccctattgatgcttgctgaatggacgcaggcagtaagagcccagagttggatttcattcagcacctaattgttgggttcattgtgtgcagtcacagagctgggtgctcagaattcagtactgagtcagccaagccctgcccttagtgagagcaggccgtgagtgagacacacacaaaacagttcagtgcagcgcaatgttactcgtgcagtgacaaaggtatgtgtgtacaggcaccttgggaggcccagggagggagcaactcattcagaccaggcctcggaggatagtttcacagggagggacagcaaagctgggtttcgaagccagggcagcactttgccaggctgagaagacaaggtggaaaatcgtccaggtagacacgggaatgcacctggtgtgtttggggaacacccagagacccatagctgcatcagcatttccagggggatgcagtaggagtgctatggaaaatggatcttgcaaagaaacgcatttctttatctcctgttagttgagcacctactctgtgccaggtactgtctcagtctctgggaataaacaccacaaaccacatttttgctctcgtggaacagacattctagcaggagaaatgggcaatcaacaaaccagtggatggtccattctccaaggaaatacaaaggggactatgagtgcttcgagaggctggggaaggcctctcccaggtgacagttaaggggggaactgaactatgtaaagagccagccacgtgcagggaaggacactccaggctgaggtgacagttggtccaagggccctgaggctggaccgaggtattccgttctggggaacagaaagaagagcctgtgtggctggggtggagtgggcaaaggagagagtcaagccacatcaagtcaggaagggacagggctgaccctcagagcagaggttctcatccctgatgtatagggaggttctcatccctgatgcacaggggcctcttaaggcccctgtggtgctcttaagagcagaactgagaaccgtgatccacagccccatgggcctgggagcctcatgtcttcgacagacagtttttgtttgcttgttgcactgcaaacttctcagagcttggaacaagccaatgcacagtgtgatgctgtgtttcccaaattcatatggacatggagccacttccaggagaagcaggtggagctagggttcctgggacaccattttggaaatctctgggccaattcataggtcatacaagtggaagaaatgactgggacaaaggttgaaaaggaagaccaccatgacagggtgctgaagagtttggactttatcctgtattaatagggagtcatccaagcatggttgtgtgctgttttgttcttaatgtgtctatttatatagattttaatcaaacaaaagggatattatcgatatctccaatgcttcggtctcccagttaataatatctcttggaaagccacctcattctttttaatccgtcatgacgatgagctataatttatctacttcgtccctgacaacaacctctctggtctccaaggctttttgcttttccaagcaatagtgtcataaacctccctggatgtaaagcatggtgaacttttgcaaatacatcttcaggggaaagtttagcagtgggatgactgggttaaagggtaaatccttttatacttcgagagccactgccaaattttcttccagagtaaaatgaaatgatacttggagtttgctttaaagtattcttacttcttccataaaaactggcagcgggagagagaagaaatcaaaatggcatcatgttgacaattatcaaaaccgggtgatgggcatatgggagctcattttgctattctctctacttttgtgtacatctggaattttccacagttaaaaaaaaagtcaccttgaaaagttctacaaattatcacttgccctaatcatgactaagaatatctttccccttatacatctactagcaatgacaccatcaaagtttgtttgttgttgttgttttcctttttttatcttttttttttttttttgaaatggagttttgctcttgtcacccaggctggagtgcaatggcatgatctcggctcactgaaacctctgcttcctggattcaagtgattctcctgcctcagcttcccaagtagctgagattacaggcacccaccaccacaccctgctaatttctgtatttttagtagagatggggtttcaccatgctggacagctggtctcgaactcttgacttcaagtgatccacctgcctcagcctcccaaactgctgggatgacaggtgtgagccactgcacccggcctttccttttttttttttttttgagatagggtctcattctgtcaccaagactggagtgcaatggtgtgatcaccactgatggctcactgcagccttgaactcgtaggcccaagtgatcctcccacctcagcctcccgagtagctcagactacacgtgtgtgccaccatacctggctaatttttgcattttttgtagagatgaggtctcacaatgttgcccaggctggtctcaaactgctgggctcaagctatcctcctgccctgacctcccaaagtgttgggattatagctgtgagccaccatgcctggcccttttgtctttcttcatagttgaaacagatctctctgttgcttcagtttccgtttatttaattatgagtaaaattgaacttctgttgtagtttgaatgtatcccccaaagttcatgttttggaaacgtaatctccaatgcaatactgttgagagatgggaccgttaagaggagattaggtcacaaaggcagagattaatggccttatagattaatgccattaccaggggagtgggttagttattgcagttatggagggagtgggttcctgataaaaggatgagtttggtccccttccttctctgtctctctctctccccccactcccctctctacccttccacctcctgccatgggatgctgcagcatgaaggccctcgccagatgcagccccctaaccctggacttcccagcctccagaattctcagaagtaaatctctctactctgttaaatcacccagtctcaagtgttcagttagagcagcacagaacagacaaagaccacatccttccctatatttcgtggttgcttcttgttctccttcttgtttcttaggaactggctgttcctatcctttgcctattcttgtctgcagtcttggccttcctggtttgtgtgagcttttcataaacatgggaagaggccttggcacaggtgttgtgaatgcattttcccagttactttttcattttccaactttgtttttcggtctttctccatacagacaattccctcaggccacattccttccttctttttcctgtgtctgggcatcgagtagtttgaaggagctctcttttgtggcagtgtgaatgctggatagagcagaactggcctcagggctgaagtggtggcctgggagagagttgtgaggtgaggatgggacaccatggccaacagggagccaggcctgagctgggaacagcaggatgactctgcattttctgagctgagtaactgggtgggtgatgatgtcactgactaggatagggaagctaggacaagcggagttcacggaaacacagcaattcccctctatggggcacgtctcaccctatgtggttacacctgcttgtatacctgactccccttctagacatgggacagggaccctgcctccttctctctgtccctggaaatggccatagcaaagagtgcccaataactgcagatatgaataaatgaatgaacaaattaataaatgaatggctccagcactttgggaggccaagacgggcagatcacttgaggccaggagttcgagaacagcctggccaacatggcgaaaccctgactctactaaaaatacaaaaattagccaggtgtggtggcacatgcctgtaatcccagctactcgggaggctgaggcaggagaatcgcttgaacccaggagatggaggttgcagcaagccaagatcacactgctgcactccagactgggagagagagccagactctgtctcaaaaaataaaatatgtccgggtacggtggctcacgcctgtaatcccagcactttgagaggctgaggcgggcagatcataaggtcaggagatcaagaccatcctgaccaacatggtgaaaccccgtctctgctaaaaatacaaaaattagctgggtgtggtgggacgtgcctgtaatcccagctactcaggaggctcaggcacgagaatcacttgaacccaggaggtggaggttgcagtgagccgagatcgtgctactgcactccaggctggcaacagagtaagactccatctgaaaaataataatagtaaataaaaataaaataaaataaatgttgctgggtgcagtggctcacacctgtaatcccagcactttggaaggccgaggcgggtagatcacctgaggtcaggagttcgagaccagcctgaccaacatggagaaaccccgtctctagtaaaaatacaaaaaattagccgggcgtggtagcgtattcctgtaatcccagctactctggaggctgaggcaggagaatcgcttgaacccaggaggcagaggttgcactgagccaagatcacaccattgcactccagcctgggcaacaaaagcgaaactctgtctcaaaaaataataataaaataaaataaattttaatttattttaaataatttaaaatttataaattaaattttataattttatattataaacagatttaattatttaaatataattacaaataaatatataattaaaatttaataattttaaaataaatttaatttaatttaatttaaaaatcaatgagtaaatggcttgagtgtgtggtccctctgtccaggtggagatgctgggaggtggaaggcagaattcacaaccgaagggattttctcctccctagtcgcctcccccagtagttgatggcggctgccacacctcaagccaagcaggggacctggcagtgttcacccgccagctgcgtgaacgcccgtaactctttacggcagaagaccaagggtgcgtctggtcctcagaactgcaggatgcaccggcagcgatggagaagcctccttggatgaggcagggtgaggaaggagaccagacaagcaagtcctcctcccagaggcagggacaggaagcaggagcaaggggccaccagggaagctgcaggggctagaacccagggaactttctagaaaggctagctggccctaacagacccctggcctggaggaagacctccagggcaggttaggcgggccagtcacatctccgggggtgatttaaaaggcaccaccttgggacaaaaggatggaagcattgaccagacaaatgcctgacccggcagcagcagaaaaggatgcatggaaccctgtggggttcccacctcatgaggtcgtctctcctcattcttgtgctcggtggctcccaaggggcaggctctagtgctccccatggagaccccaggcccagccgccttccaaggctcatgccctgttaaacggggacacgctccggccgcccgggatccccaaatctgtagcaggagcgccctctgctggccatcttgggtggcgcctctgcgctgcagtcccgagaggagcccgcgaggccgcgggaggaatgcagggaccctggagacccatcctccacctgcgctctgcaaactactccttctcccccagggtcctggctcctcctcgccatcttcagcttcaccgtctctagtcccttaacagccagagcaccaggccccggctgggccgtgtgtccatgcctctgcctccaggcgcatggacacaacattcccttctgaagctggcctgcgctgtgtatcaccccctatcccccatccctccatctcaaaaaagcccttccctgcctttggcacgtgtccctcccccacgcccacccgctcaagtccctctgttaataaactgctaaccccaaaaccagccttccctccagcttgcccggccccgagtctgagggtccctggagcagacacgctccacccgcggggacctctccctcctgtcaactcctgaggagcggcagcggcttctgggcttcccacgcggggtgtgacaccaacgggggacataatacaaacgaacgagggtaaagtccgtgtgcacacctgtgcatggccacatgcggatgtgcgtccaggcgtgccttgcaggtgtgtgggcagtgactgcgcccacccctctgtcgggtctcgccacgcttagctgggtgggctccttccaacccaggctggggctgagcaggaggaagccgcggcctcgcccccagagggcagcactgagctgttctggcccgactgctgccagactctacccggagaggagtcctgagtttccccgtccagggcctgggggaaggacttcaaatctgtaaaggaaagcaaggaatcaaatcccaaatccaggctagcggttacactgcgggcagagcgcgaggcgcacatcgaagctaaaatgtccaaaattgggcagtggattcacggatgtttgttgtgcttttattctttttttgtttttttcttttttttttttttttttttttttgaggtcgagtttcactcttgtcgcccaggctggagtgaaatggggtgatctcggctcactgcaacctccacctcctgggttcaagcgattctcctgcctcagcctcccaagtagctgggattacaggcgcctgccaccacgcccggctaatttttgtatttttagtagagacagggtttcaccatgttggccaggctggtctcgaactcctgacctcaggtgatccgcccacctcggcctcccaaagtgctgggattactggcgtgagccacagcgcccggcagtgccttcattcttaaatcctacacatattttgtaaatattattttgaatctattcagtattactcttttcaaaataaaggcctccgagccctctctagaatgtggaaagaccactcatcgctcagtggagcaaagtgagcctacaagctccccagatcgcccccagaacccccagaatgcagagggctctgagtgtctctggggttgcctgtggctttggggaaggggagagcctggacccaggcttctttaccgcccggagtcccgggtcagcactcctgcaggataagccacacatcgacacgcagctcacacacacacacacacacttccagattcatacacaggtgcatgctcacaggttgacacacacatgctcaaagactcatacacacacgttcacacatagctcacatgcacatacacacacacattgagactctcagacacacacagactgatacacgtacattcacacacagctcatacgaacatttacactctcaaattcacacacaggcacatgctcacaggctgacacacactcaaagactcatatacacacattcacacacagttcacatgcacactcacactcccagattcacacacaggcgcatgctcacagatcgatacacacacactcaaagactcctatatacacattcacacatagctcacaggcacatccacacacacacattgacactctcagacatgcgcacacacaaagactcacacacacacgttcacacacagctcacacacacactcccagattcacacacaggcgcatgctcacagatacacactcaaagactcatatacacacattcacacacacattgacactctcagacacatgcacacacaaagactcacacacacgttcacacacagctcatacacacactcacactcccagattcacacacaggcacatgctcacaggctgacacacactcaaagactcatacccattcacgtgccgctcacatgtacattcacacacatacactgacattcccagactcacacacaccagcacatgctcacaaacttccccatactcacaaacttccccatactcacactcacactcatagactcatgtccacactgtcacccactcatggacacacgcgcaaactttcacattcacacaacctctcacgggtacacaccttacacactcacacaaagacgccattgccactctggcctgttaatcttacatcctcatcaggaaagaggaggggcttgtatcctccctgattgcaagagagatttctagaatgttcccaggagaccccagtcccaaggtagagggatattcctcctggactggaggaagcagaatcggggccaggactgggcctcagaggaactccccgggcttcctgtacccactcactagctcatcctctcactccccagcccatacgtgggagagcctgacctggggacatgacaggggacacacagcaggccctgatcttggggagctcctggacctcacgagacaccgtggagacctgtgcaggctggcctgtgggagtgcccatgaggggtccctgacccagcctcaaggcaggacaggtggggaaaggatctgagcaggtccagcacagcaggagacacaggagatgccggccttccaggcagggtgatgggcacatgccatggcagggggcaccctcagggaagcatgagatgtcccaggccaggggagctggctggaaaggcagggggtgggggctgggcctggcaaggtgagcaggggcccacctgggagaggcccacctgggagaggccctgcgtgccacacgagggagcggggccttgctcctgaaagccacagggagccctgattaactgcacaggacaggagaggacacagctgctctgcagaggcacacagcttgtacccaaaacctgcaggagggcaggtggtcctcagcctccattccaggagcagagcaggcccaggagcccaccactggtccagggaaaccccccacaggtacagccacgttcttccctgattcatcacaacgaggcccctgtaagtgacagagggtcggtctgtgcagacctggaaacacacggccccaagacctgggatcctgaagaagcagtgccagctcctcccagacagcccgccccagctggcccgctggctccagcccagccaggagcgagggcagtgggggagccccacaggagggaacgggggctcaggaggcctggtggggcagagctgggacagctgggcgaaggggctgggtcctggctccgcgacgagggcccattcctgggtgagggagggtggggcagcccacacattccagctgctgccgctcccgccagccagtaccagcctgttctcgcctgttcccactaggtcccaggctgccctgggcccagctcccagtgccagctcccagaatccttcagggttcagactctaactacagggacgccagtgcgaatgtccagaagaccaccccacagaaacaagtgcctcccccaccaacacacatgcacacacacaccccaccaacacacacacacgcatgcatgcacacacactaccaccaaccaacacacatgcacacacacaaacacacaccctaccaacacacacacacaccaccaacacacgcatgcacacacactaccaccaaccaacacacatgcacacacatacacagacacacaccctaccaacacacatgcacacacatacacacaccccaccaacacacacgcatgcacacacatacacacacatacacacacactgcacacacaccccaacacacatgcatgcacacacacatgaaccccaccaacacacatgaacacacactcacatcccagcaacacatgtctgcacacatgcacacacacacgccatcaacacacatgcacatacacacacacaaagccatcctcaaccacaggacacagacacagagcagggttttcaggagctgaggcacttccttccactgcaggcagcacccagccaggacaaagttctatcctcttgccacaaggccctggacagagaagcagggaaagcagccaaggtccccagagagcccctggaatggggcaccccagagccagccccagggctcagccaaagaaagctggggaagtgaggagctgcccccagaaagaggagccaaggggtctctgccccagcctgggacacctcagccaggcttgcccaccactgctctgcaaggggctaggtggggccagggggctgcacctgctctggtccctgccccccaacccagctgcctggagctcagcctgccgccctcaccgtggaggctacgctagatgcccaggaccagtgtcccaccccatccctcagcctctgctcccacagccctgctgtcacccttcctgtcctccctgcaggacagaattcccacgcccaccctgggcccagggccaggaactgctggttcccaccaaggcttgggaagtgatttctgcagaccaagccaccctgggcccaccctgggcccatcacaggttcccaggaaacagcttggccctacctgctgcgaggcatgacagaggggaccagccctgggctgtgctcagaaatgctgaggcctcagaactgggcaacagggaggcaaggaggtcccccatgggtggttgttggtgtgattgaaatgctggctctaccagtagccctccaggaagaggctaaacagtgagcaaggtccccaaatcccaaacttgaagtttccttccccaatcaccatccaggggccctgccagactcacagacagtgatggagaagctacagcgctaagttggggggtcctgtggtggagaagatgcaggtcccagcacagctcatctcagctcccaacacacatcctcagtctcatggtcacattccatccaccaagaacccagggacattcagctaggcttggtggtgtgcacctgtgatcccagctactcaggaggctggggtgggagaaccgcttgagcccaggagatcaagcctgcacgagctgtgatggcgtcactgcactccaacctgggcgacagagtgaggccctatctcaaaaataacaaaaaaaaattttaattaagtgaaaaacaaaaagcgcccagggacattgggaaagggagttcctacccccactttccaggaaagaaaacagaggcccaaagagaggaagtggattgtgggaagaatttcactgcagtaagtggtgaggactgaccttggccaaccccatatagaccccttccagacccaggtgccagtgcagacagcccagctggggtgtgggggacacagggccaagtggcaaggtgtcagcagcagtccccagagatgggcaccccatgggcacaagtccgcactcacagcctctactccagggccccatctggcacagagctccaagctgcttaggacaaaggcatcccttagaggctggaggcagcaaacagaacgtgtccctctgctgcttcctggccactgcggggccctcaccaccacctcagctctcagaacatccttcattctgcccccagcatctactgagcaatgaccaagaccaaagctccaaaccacagactgcctggggcctcggcctccagctctccaactgcagaggcaagagcagagtgtgaggagggggtgaggagtgggcaccccaattgccctggccactgtgggagcttgggctctagcaggctgatctcccccagcctgcaccccacccagcaaggacatgcaagccaagcagttcccacaccccgttcctggtggctgccagaagcttccttacaaggccccagcgctgagctggctcagctgcaggcgggggcctgggtggggcacagcacacctggctcagccaagcccagacgcaccctgcaagtgaggaatgcggacgccgcccgggctggccctgggaaagctgctgccctcggctcctgcccagccctgactcagcctaggtgggccagggaagctgcagcctcagcagaaccaagtctcccaccccaccctccccgctggcctgcctgggattgaaccaggggacaggtcctggcaggggactgagagtagagacagcaccccctggcctcaggacttgggggaacagcagggactctgtgggacctgcccttctcctgcactgtctggagggtgccagcacagctctgtccgggggggctgcccacagcacattttcccagatgcctgagcctcagtttcctcatccgtaaaagggggctagtgacattcctgcccacagtgcagggctgcagtggtggaggaggttcccgggaagcatttgagaagcaaacagacctcttcctaagaaacagaagcgtctgcctaaccccatgaggccaggtgatcccgtgctccatgcagaagaaacagaagcgtctgcccagccccgtgaggccgggtggtcccgtgctccatgcagagcagggtgactccatcatcctctgtccctggccccaatacggttattccaaactccccaggacaagggctgtgtctccccctccgactaggcggtccctgaaggctcggggcatgtctcccctcagacaagaggcttcccagggacagaaactccatcctccttgctccatcgccccacagtcccatgccctgcactgcggaaaccacaggccagtgaaggccagaaaaactgcccgtcccctcctggcgccaccttaccccagcctccccaggccctgacatccacctccttgcccacccagccagcccccaaacgcgacgctggagtgcctcacggtgcccacccagaccctggggatcaggaggcagagccccccaggtctggcgctggtagaatctcccatccctccctgcctgcaaagaaagggcccactggcctccctccctgagccctcccacagctgggctggccagagagaactttctccctctgctctctttctctgctgtagttcaagcacagaccctctcaccccagccagcccttctccaccttccgggcgcacagtcttaggggtggagcagaggctgaggttgggggcctcacagtcaaaggtgctgagacaacagccccgctgccctgtgctcactcagaagctcctggggaactggagtggaggggaagggtccccaagcccacaggttctggctgcccctgccacgtcccctcccccagccaggcttctcccaactgcggcagggcgtctgggctcaggttggggtgcagcgttggcaggacaaacagtctccagtgttgggtgtttgcctcggttaccaaggagggaggtgaggggcctggctccctgccatgtttgggccccgggctgaaggtgtgggtggcagggaaggtggaggatttgaggtggggaggctcacttcccgctcccagggctcgagggcagggcaagccagctgggactgccagatccctgggcggattcagacctgcatcggccctgcctttctgctggctctgggaaactcagtcaggcaggaggagacgctgggggcggggcagcctcccttgctgctcaaagcagggctgtgggctggaggctgggccccggcaagtcaggtactgccgtgggtgtcccaaccttccgggactgacggcaccacggcctaactcaggccgcccgggagagaggcctaggagcccagctctgggcccatgaatttggacaagtcaccgcccctctctgggccccagtttccccacctatatagtgtcaggagctggcctgtgtagtcccacaggggcctcctttgttttgtcctccctgtcatgagctgggcaggtggatgctgaggggttgaggagttgggcactgagccgggagttgtgacccggccttgaagccctggctggaagggctcagtacacatccaggcggccctactgccctgtctgaggctggcatgcagtgagtgcccggctgagtgcaggagcccagggctgtggtcaggaatggccgggccctttctccctctctcagcaatgatgagagccacagcccaaggaatcccctgctgcctcctgctcccaggtctccatcgcagcctcagcatgaccggctctgagcaggaagtaggggaagcaggacagaggctggcctggcagtcagagagtgcacagcctggctcaggaggctggcaggtcatcaggggcatagagctggccctcgttgatggggcagggatggcttggggagggtggagacgccgaggcttgaattagggggtggggggtgcaggtagggaagaaaggaagaggacttgagattgtgaccaggcagtgccacaaggaacacaggagtgtgggccttccatggggagggaggaaggtgaggccaaaagatggcggggcaggggaagggaccacttgccttgcagcccggccagagagagcgagaatgagcagttcccacaccatgaagacctttgccctggccctgctggtggccctgctgtgcacagagagaccccaaggtctatgctgccaccagtgcttggtggccccagcctggcacaggcatgcctgccccgctgccacatgccccttccctgacagggtctgcgtctcgggatatgagagacacagggagtctgggtccctgtggcatctgggaaagtgagagtggggaacaggctctgcctcctttccctcctgccccaagaatgataccatcatttggaatgtggaggttctggacacctctatgagttccaagctttcttgttgcaagagaggcctctgtaatgcgggggtcctggtggcaggcagcacctgggcccttccttgggactcctgctcagcctgggtcagttcccctctgggccctgctgtgatggcctttcctgtcccccttaccccatggccccctcctctgtccccatgcatagtgtcctcctcagtttgggaccacttcggcactgaccctcgggaattccagtgtggttttgcagccgcgcgttcaggggaaggatgtggtggggcagaggcgggggcttccctgtcaggggactctggcaccgggcgggtccctgcggcagacttggaatccctgcttggactcatcctgttacctgggcccagggccttcaaacccacattccctacatcgccacctccttaaaccacccggcctcagagccaggggccttgccatttgctgttctgaacctggaaccacaggaagaacacaggccaggggcaggagtccagggttccgtcctacccagccattaacttaacacggagccagggccacacaacgcaccactccggaccacctctgttcaagcaaggaagaaacccagggctctggagcccctcaggcctcccacacagggcgagagctcccctgtctcaaggtcaataaacacccctctgcttactcaaaaaaagacagagagagagagagagagagacagcagggtccagtctctgagggccttgcgaccaggctgagacatggaatgggggccagtgaagggcgaaggaaaggactgaaccccagcaggagcgactcagcaccccacacacagacacggtctctgggccctgaccacggctccggacacccccaggaaatgctgagacctagatctctgctttgtgtgctttggataagcgcatgagctaatgccagtctgatccagacctgccctccgaagctgcaaggtggcaaaacagaagaggcctgcccacacaggtgcaccagccaccagaggactgggtgtggggctgggtggccagcagctgagggtcctaggcagggcagcaggagggtcggccctggggcagggagaaccgagggccccttcccccgctactgtgccacttgccgcctgcaaacagggaatcccaggaggccggatcttctcgctttgcacccaggaagctagaactctggatttgtatgggaagcctcctgatgcttcatatttggaaactaattccaaaataacaccctgtgcaggccaaagaaagcaaggcattcagccagccttggagctcatgtgggctgaaggacaatctcactcaggaccccctttacaaaaaagtaaagtgaggcccaggagggatgggcttgcagccagttaggatcaagttgggccgaaactcaggccctgactttcctgtgctctccccaacaaggttcccaccccctcacctgctccaccgtgcagaccccagcccagctgaagagcgccctcacgaaccccacacacacccagcaggcttttgctctgcacacgcctgggtgccgaggtctcccataccctctgactgatctgacctggcagctgcctgaattgttttccccattttacagaaaagggaaattgaggccagagaggcaggccattgcccagagtcctcctctgccaagttctagacagtggggagggggctgtgtgcccgcttacaggtctctgtaactcaggtggcagggaggccccaacttgcagggcagggaggggctggcagggatgaggcagggccaggccaggcaggcccagagccactcagcatgcaggcccagtccagagaagccaggcctctgcctccccctccccaagcctgaagaggaactcagcagggacccagatggcctcaaggccggggatgaaccacagacaagaggaggtgccacccgggctagagagaaccaggggagggcagggcactgaggaccacacggtggccgtgccccacacccactcccacccagggacccttgagtcccacttctagccctgggccacagcaggggcattgtaatgctggccttttgtgtgcttgggggtggcggtagtaaggagaaatgccccctccaggtggtcagtgccccaggcctcctggagcaccccagagatggtgaggtcgaacccatgggttcagcacctgccctgtgccaggtcccatgtcagggggacacaagaattaataggacgtgacacaagaatgaacaggacctggttctgccccgggtggctcacagtccagggggagaggagagtgaataaataaaactcagtcgagttgaaattgaccagggccttcaccgcagacggtgggcagggggaagagaggcaccctggggagggctcccagctgtggaataggcatgggactcttcctggaagttagttctggtctttttccattttttatgcagaaaaatgcacatataattgctgtacaactcagtgaattttcacagactgaacccaactgtgtaaccagcacccagatcacagcacccagatcacaaggttgtcacagggacacaggggaaagggcattccaggaaagggccactgaggagcgaaggcagggaggtgggaactgcccagccccagcaggtacccagagccaggaggatccagcaggcctctctcctcacccaaagaggatgggtgctcaaactccagacctgctccaagaaacatatctgcagccctaaagcccccaacgcccccaacccgctgtcctgtccaccttctccgctccacaatccagcctgcgcctcgtactgcaccagagagatatgctaaccacatgcaaaggtatgcaaatgaacacagactccctgagtcaacttgggcagtagccagagtgagtgaagaaccagacctccaaacaggtgactagaccggcccctgcccctggccccattcctcccaccagctcctgagcaccacagccctgcacccccacaccctcaacccaaagctctgaccacctgcccttcccttcatctattcatttaactttgattctcagggggccaagggccagtccccaaagtgagcaccagagagctgagcacctgcccaccaggagctcacagtgagcagggaaggggaggggatgcagacacggccaccaattcccaggaagagcctgcctcaggacagagcttccaagcctcagaacagcaggtgctgactcagtagtgtgggatctggcccaacactctgcatttcccaccagctcccagcggacgccaaggctgcgggtcccaggccacacccagattagccaggagtaaaggaggtgtgagaaacatggccctaggaacacgaagggctgggggacaggcagggcaggagagtggctaagagatgtgcctggattcaggtcccagctctgcctcctgcccatcgtggccgtgttgcttcccatcccccagcctcagagccctcagccctaaggtaccccctgtaacaactgcccccacgtcaccaggtcccagaggcttcagtgagaccaactggcctagggcccctgtggcacctgacaccctgcaagcacttggtaatcgggagattatttttaagtcagggtcgactgggaagaggcacaagggacgtgtttggggtgaagggaatgttctctgtcttgattatggtggtggtctcttggaagatgtcaaggacaggggattcaccaggaggagggactgcaagagcagaggcctgcaggtgtggacatgcagccagggaggacagatgacagctaaccttcactgagtgctttctacaaagtggaagacagccaggggccacagtcggaaggacagagtcccaccccccaccccccacccccactccaggggtggcaggagggtggagccatggagcctggctgtgagctcctgggtgggctggcaacacctgccatgaattgggcacctattagcagtcaggcactggtgtgagactttacctagtcagagcccgcctgtctgtcttgtgtggccccaagagctaagaatgattttcacatttttaggtagttcttttaaaaatcaaaagaacaggctgggtgcagtggcttgtgcctgtaatctcaacaccttgagaggccaaggcgggaggatcacttgaagccaggagtttgagacctgcctaggcaagaaagcaagacccaacaacaagaaaatgtttaattagccaggcatggtggtgtgtgtctgtagtcccacctactgtggagactgaagtgggaggatcatttgagccccgggaatttgaaggtgcagtgagctatgatcgtgccactgcactccagcctgggtaatagaataggatcttgtctctaaaataaataaaataaaggaagaagacagccaggcatggtggcttatgcctgtaatcccagcactttgggaggccaaggtgggtggatcacttgaggtcaggaattcaagaccagcctgaccaaaatggtgaaacctcatctctactaaaaatacaaaattagccgggcgtggtggcgcatgtctgtaatcccagctacttgggggctgaggcaggagaatcgcttgaacccaggaggtgaaggttgcggtgaacagagatcgtgccattgcactccagcctgggcaacaagagcgaaactccgtctcaaaaaaataagtaaataaaataaagaaaggaagaagaacaatacagtcgatcctccatatccatggattcaactaaccacagatggacaatattccaaaaatcaaaattgtttctgtactaaacatgttcagacttttttttgtggttattccctaaacaatatagtataacaattatggcggctgggcacgtggctcacacctgtaatcccagcactttgggaggccaaggcaggcggatcactaggtcaagagatcaagacaatcctggctaacatggtgaaacaccgtctctactaaaaatacaaaaattagccaggcatggtggtgtgtgcctgtagtcctagctactccagaggctgaggcaggagaatcacttgaacctgggaggcggaggttgcagtgagccaagatcgcaccactgcactccagccagggcgacagagcaagactccgtctcaaaaaaaaaaaattatctatacagcatttacatcgtattaggtcttctgagtaatccggagataatttaaagtatacagagggtgtgcgtaggttatatgcaaatattactccattttatagcagtgacttcagcacctgcaaattttagtattaagtagaaggtcctggaaccaaagccccatggaacccgagggacagctgcgttttgtgacatctgaacagccacccccacgcacccacgggttgtcccacaccacaagggcagcgttgagtggctgcgatagaggccttacagaccttcagtttttctataaatcccatgaagtaggggtcaagtccccactgtacaaagaagagtaaaggggccacccagccttccttccctgctgctgttaggacctcctcctccacccactcctggtgggacagacccagcgccccttagcccagcaggtactcctggcccacctctgctgcacccgctcacctggcggagcagcagcgccccctgccggtggtccggggctggccggcgcgccctaaggccggactcttagcttctgccaccacctggtggccatttctggaagcgcagctgggagcccagatccggtgagcaaaagctctcgtgggttccaagagaggccctgctggtccagccaggtgtggcaacgaccagcgcgcaaagtattccaggcagggcttgacgcctccaagctagtatccactgaaaaagtttcacttcgtccctgctttttctttttttttttttttgagacagagtcttgctctgttgcccaggctggagtgcagtggcacgatctcggctcactgcaacctccgcctcccgggttcaagctattctcctgtctcagcctccagagtagccaggattacaggcacccacgacgctgggtaatttttgtgtttttagtagagacggggtttgctatgttgacaaggctggtttcaaactcctgacctcagatgatccgcccgcctaggcctcccaaagtggtgggattacaggcgtgagccaccacgcccagcccttgcttattattccatcggtgagaaaacacctgacagagcttaaatgtttactaactgtggctgtgaatctctaacccctggggaattgatcaaagaccatgaactatggccaaaagatgatggaggggatgtgaaggtcagctgacttaagtcccttcccccgtgcatttggccttgagtacttcatcattctttcttaacttcattcgttattcattctttcagcaaactcttcttgagcactacacaatgtgcggtgccaggtgctggagaaacacctgagaacatgcaaagcagtccgccctcatggaagtgactaacaaatcattcacaaggtgtgatgaggcatatttggaggggcagagaagccacttgagcatcacatatgggcagcgacttgaccttgttgagtgtcatggaaggcttacagtggcctgagaatgggtcgtctagccgacagggtggaagaaccacatgtgcaaagttccagagctgaggagtgtatccagaaagtggctggaagaaggactgaccggcaggaatgcagaggttgatggagagaggaggtgaggcagagctggagagagaagggggctgagccagacagagcctccaatgctgggtggatctgcaaagttaaggcatctgctcatgctctggggcaacagggggccactgcctgtcctgggaggagacagagcacattctgctccttagtagagcccactgtatgactgggcagctctgctagctggaaagttcattctgagatgaaattgatgcctcccctgcccacaggctcctgaggcatacacacagatggaggtgcttccctgcccccagcacagcccctcaccctataacagcctcactggctgttccctggcagaggccctcacacagggtaggcaggagggcacgctggatgtgaatcccagctcaagcccttaccggctgtgttgtctgtctcttacttaacctctctgaacttccattttctcctctgacttcagggctgcacatgtaagagggatagtgttgggaagtgcttagtacacattaggtactcagtggtgataacagaggtggtgacaatgacatggtttatccccagctgaccttttccagaaaagatcctatcagtcagtgttctgcattttaaaatgtgccaccaggatggggcacggcagcttgagcctgtaatcctggcactttgggagactgaggctgtaggatcgctagagcctaggagtttgagaccagcctgggcaacatagggagaccgcccccaccgcccacctttacaaaaaaattaaaaattagccggtcatggtggcatgcatctgtaggctcagctactcaggaggctgatgcaggaggatcacttgagcccaggaggtcaaggctgcagtgaaccatgactgagccactgcaatccagccagggcaacagagcaagatgctatctcaaaaaaaaaaaaaaaagtgctattaagagctgaactctgttctggggggagtagcctttccttcccttctctgagcctcagtttccctatatataaaagaaaggaatcagataagatggcctgaaaggctgccaccagttctaatgctctcaggtcctgctctctgacctacccaggacacatggaaccatcatcacctccttgatccaggcactctactcctcataatggaaccaagatggtcttcactttattttttttttcccattgtccctgtccttactgccctctgtgttatgccaacctcctctgagttaactgaggctcagaggctcaagcagtctttgccaccctctccccactgtcccccccacccctcactctcccaccagactgtctgctccatccccgtcccaactgctcccacctggactccctgctgcccttggttcctaccccacccctctgtccactcccccactcacatacctggccctccttcccccatgcagcccatctaccttcacagggaggcagcaagacacccccgccggcctaggagggtcgagatcctaggactctactttttccagtcctggtatttgcctacacgccccagcctcccacccccagcgccccccccaacacacacacacccacacacacacacacgcacgcacgcacgcaattataacccccttagggacagccgttgtgtctgctgtagtttagccttggattcatcatggcttcgacatcgccggccctgggccagtgttcgagagcatggccccaaacagttcttgctctgttcagctccccacattgccaagctgcgagcgggctctctgtgcttcctgccttctgtctgcctcgcctgttctctccaggtaggcggctcctcctccaagctcccccagccctgggctgacctctgtcacctggatggtgggtgcgggttctccgggcatgcacctcgttcccctctttactcccagcagtggctgaaacttgtgggtgcttgatcgtgctagttaaatgaatgaacatgtggtggttacaggcaaacccacaatgccacacaggacaccgaccaacaactgaaaacggtgacagctgcccttacccgcagctccccagcgtagccctcccccatcgcagccagaccggcttgcccactgcgcagcaaggcggagccccgcacagctaagcccgggcgtggtgctcgcggcgccctctgctggccgggcccacggcctcctcctgcgcacgcgcgccgccaccccgggaccagacctaaagggagaaggcgcgatctggggccctccctccgcaccccctcgccccgagaagccccaaacccaggtctttgaccctcatgaacatcctttgtccttcctctctcctgctccccctgcaaacattttaggcatccctaaatgatcaccagccctcgcctgctctcttagcaggcctccaggtggggttagaattgtcaaatgctggcacaggacgaaaccctaataataataactatgatgatgacggcagctgctgctgagcgggcactttgtggttaccttagcaaccttccaccatccaggaagtgcagccccttctttcacaggcggcagctgcagccagaggcgtgcggggacttcccaaggtcacacagcaagaatcctaagaaacccggggtgtttcctctgcctacgtggagctaaccctgcctccagaagcaggggccttgagatgggagcagagcgatctggtgccccggaaaccccacccccacccccaccttgccccatgcgcagcgaacgtggctacatttcctatcgtttgtccaacccatcattttgcctttgggaaaattgcaggggaggtggaggccagaggacagggagacaaacgttcgtgggcatctgccacgagcacatttgccacgctttgtgacaggccctttcccgttacacaccacacctgcccaggaccgcagcacagaaccaggacccaaacccgccgactccctccctagtgctccttcctcaccccccaccccctcccccctccgcaagttctctcttggaaaaggggccgctgggaaggggaggaaacgcactcactacaggactccaggtggggtccagaggctctgcccctggtgcctcttccccagccctaaagcccccagccctagagaggggaccctcctgcacaacatctccaggggaccgggtactccactagggtcgagaaacgttgaatagtgcggtgggtgcgggaggcgcgcctaggtgccgaaacccggtctgtgctgccatcctgtggccattgcaggaagtgtgcctgtcaggccgctctgcattgaacctgaaatgccgggtcacccttgggttgagtgaaaccgggccccatgctgaggctacaagggacatagaaagggacaagacgcagcccgtgccctgaaagagcttacagttcggtaggatggccttcaaatgacatgatccaacactcaactcggcgccagataccgcccaaaatagaagatcgtgcaaaaggttccaaaaggtggaggcagcctgccccgaagcacatcgagaaagccctcctgcagcaaagccgtgtcgagactgggccttacagggcaggcggggctggggcaaacagagatgaaggaaggcgctccaggcggagagaccagcctgagcaaaggcacaggggcaggaaacacggattctcaggaatccagcttgtcccaagtctaggtcaactgtgaaggggagagcagcatggccaggtcctccagtgcccaggtaggaggtttcacttaaccctttaggccacgcggccaacaaaggtctttgagcaagccagcagcttgaccagaagtctgtccaggaaaagagcatgatagctggggaacgggggcaaatgggtgaggtttcagagcaattaggaaggaaggagaacaggaggaggcatgagcgacgcggatggtggtgccactggcagagctgggaagtcaggggccacgcaggggagaccagggctggggtttaagttcctggcagaacatcccagtgaagacgtccttcaggaagccagaaagaatacattaataaaagaggaagtaatagttattgctcatatgtgtacagactttatagtaaataaagcagcttaatccatcatgcatttgactcatattttatttatttatcttttttttttctttttgagatggataaaccccacccccttgcccaccctcgtggtctggcccctgtgcactgctccggcccctccccttcccagtgtcttatgatggcctctgggcctttctagtcagcttgggcccacgtcttccctttgcctggctgagcttcacttgccctgtggtcttagcttagtggttcctttttccaggaatccttcctataccttgcaggttgggttgggtgccgtagctgtgatgcccctgccccgtacacccttgacatttgcccatcatggcctgtatggtgcgtgactgtggtctgtctccccaccaactttacttcagtgtggcggctgggtcttattgaccactcaccccagtggcctgctcagtatcagtcaatgaacatttcttgaatggaagacctgagtgaggaatgtgaagccctgcgggacctgctggcacagcgcagcagccgaagcgggggcagacagaggcatccgggagggccagagctggtctctgaaggctggtctcgaactcctgacctcatatgatccacacacctcagcctcccaaagtgctgggattacaggtgtgagccaccacacccagcctggaaagtttatttattcaggtctgttgcagcctcacttcccagtctgtgaagataagagctaatttctcatccagagaagggacctccgagaggaatctttatggcttactgcatacaggaaaagacaggtcagctcgccctttctaaaactacaatttctccaatatttacagctcaaaataatcactatgccaatttggcatatttggggatggcacgttcttcactccgttgggggacttcagtgaatacggtgttagattgcagtgagggagacagatattaactaacagccaaaataaataagtaaattacagggtgtaggagatgatgtcctggagggaaatgagcagtaatgcagaaaaagggagaggaggaagactgcggggaggggtacaattcaaaatagggaggtcaaggctgggcacggggactcacacctataatcccagcactttgggaggccgaggcagatagatcacctcaggtcaggagtttgagaccagactggccaacctggtgaaaccccgtctctaccaaaaatacaaaaaattagccaggcgtggtggcacgcgcctgtagtcccagctactcgggaggctgaggaaggagaaccacttgaactcaggaggcgggggttgtggtgagccgagatcacgccactgcactccagcctgggcaaggagagggaaattccatctaaaaaataataataataataagagaggtcaggacaggcctcatacaaaagtgctatgtaagcaaaaccttagactttgagaaagaaagccatggagatatctagagggaagcttccagaccccaaggtgggagcatttctgacatgctctaggcccagctgggggctggtgtggctggagtggggacggaaggccaagtagttgagatgagatgagcagagtcacaggcactggatcacagggggcctcctagaatgtggtggagactgtggctgctgtgtcgaatgaaggtgccagggagcagggacaggagtgagacccactgggagatgaggaaactactccaatagtccaggcgagagaggatggtggctcagatcagagtggagcaaaggaaccctacactgaactgtaggcttgaaaatgatgtacaggtggcaagaagcaacgagacactggagctaacacgcagggaaagcccccagacgtcccaacaaactgtagtgggcggaggagtcaagaatgctattactgagaggatagagctgccatgaacaatgggaaggttgtgggcaggagctgttcagtggcaggagattagaggttcagtctgagtcatattgagtttgagatgtttattaaacatcagtgggggccaggcacggtggcttatgcatgtaatcccagaattttaggaggccaaggtgagtggatcacctgaggtcaggagttcaagtctagcctggccaacatggcgaaaccccgtctctattaaaaatacacaaattagccaggcatggtggcacgcacctgtagtcccagctacttgggaggctgaggcaagataatcacttgaacccagaaggtggaggttgcagtgagccaagatggcgccactgcactccagcctgggcaacagagtgagaccctgtctcaaaaaagaactaaatgaataaatactgttttccaaccctgtgtgttttcatgcccacttttgcacaggaaggaactgagaatcagatgggtgaaggcacttagccaggcgggaagctcccaagagcaaagccctggcccaaggatccttgccccggagatgtttctgtgtgtttttttgagacagtctcattctgtcacccaggctagagtgcagtggcatgatctcagctcactgcaacctctgcctcctgggttcaagcaattctcatgcctcagcctcccgagtagcctgaacagagatgtttctggttcactgagctgctgtgattctaacaccccctctggggagagatctggaaatataaacccatgagagctgaattgaactaacgtgcaactttaggaatcttttttttttttttttgagacagagtctccctctgtcaccaggctggagtgcagtgagagagcacaatcacagctcactgcagcctcgacctcccaggctcaggggatcctcccacctcagcctcccaagtatctgggaccacaggcatgtgccaccatatccagtgtattagttcattctcatgctgctgataaggacataccctagactgagcaatttacacaagaaaaagggttttttttttcttgtttttatgggtttttttttttttttttttttggagacagagtcttgctctgtccccaggctggagtgcattggcgtgatctcatctcactgcaacctccgcctcccgggttcaagcaattctcctgcctcagcctcccgagtagctgggattacaggtgagcaccaccacgcccagctaatttttgtatttttagtagagacagggtttcaccatgttggccaggatggtctcgatctcttgacctcgtaatctacctgcctcgacctcccaaagtgtggggattacaagtttgagccaccgcgcccggccaagaaagaggtttaatgaacttacagttccacatggctggggaggcctcacaatcatggcagaatgagaagcaagtcatgtcttatatggatggtggcaggtaaagagagagaacttgtccggggaaactcctctttaaaaaaacatcaggcagccataaaaaatgatgagttcatgtcctttgcagggacatggatgaagctggaaaccatcattctcagcaaactatcacaaggacaaaaaaccaaacaccgcatgttctcactcataggtgggaattgatcaaagaaaacacatggacacaggaaggggaacatcacacactggggactgttgtggggtggggggaggggggagggatagcattaggagatatacctaatgctaaatgacaagttaatgggtgcagcacaccaacatggcacatgtatacatatataacaaacctgcacattgtgcacatgtaccctaaaacttaaagtataataataataataataataaacatcagatcttgtgagacttattcactatcaagagaacagcatgggaaagattcgcccccatcattcaattacctcccactgggtccccactataacatgtgggaattcaagatgagatttagggccgggcacggtggctcatcttcttcatttatcacattgttaaaataattgggaggccattagactgaagccactctagtgccctgggtttcttttttttttttttttttttgagacagagtttcactcttgtcacccagcctggcgtgcagtggtgcaatctcagctcactgcaacctccacctcctgggttcaagcaattctcttgcctcagcctcccgagtagctgggattacaggcgcctgccactacgtctggctaatttttagtgtttttagtagaggcggagttttgccatgttcgccaggctggtctcaaactcctgacctcaagtgatccacccacctcggcctcccagactgctgggattacaggcatgagccacggtgcccggccttgtgccctgggtttctatgtaagtaaatcaaaacccatctcagtatagatgggtttaactaatcagaaaccaccacaagttactactagcaagggactttccatgcgaataatctgcatttgaaccaatcaaatagtttctttgctctgcttcaaagtttaccctatacaatttttcctttatgctctgaaacaccagaatcccccagtctgggattcatcccccagtctgcctgattcatgaatcactgtctgctcaaattagcactttttttgttttgttttgtttttgaagagacaaggtctcactatgttgtccaggctggtcttgaactcctgggttcaagtgatcctcccacctcagcctccaaaagtgctgggattgcaggcatgagccacctcacctggccagctctttaaaattctaatatgccagtttatcttttttttttttttttttgagacggagtctcgctctgtcactcaggctggagtgcagtggcctgatctcagctcaccgcaagctccgcctcccgggttcacaccattctcctgcctcagcctcccaagtagctggtactacaggcacccgccaccacgcccagctatttttttgtatttttagtagagacggggtttcaccatgttagccaggatggtttcgatctcctgacctcgtgatctgcccgtctcggcctcccaaagtgctgggattacaggcgtgagccgctgcacccagcgcaagtttatcttttaacacctggaatacttctgttaccagaaaggggtcctgagtcctgatccagaccccaagagagggttcttggagctactgcaacaaagaattcagggcaagtctacacagtaaagtgaaagcaagtttattaagaaagcaaagaaatttaaaaatggctactccataggcagagcagccccaaggtctgctggttggttatttttatgaatatttgttgatctcatgacaaatatagggtagactgtttatcagttttctgggaaaggggcaggggtttcctggaactgaaggttcttcttccttttataccatattgggcaacctccgggcattgccatggcatttgggagtgtcttttagcatatgctaatgtattataattagcatataatgagcagtgaggatgaccaggggtcacattcattgccatgttagtttgggtgggttttgtctggcttctttagtgcatcctgttttatcagctgggtccttgtgtaactactgtcttctgcaagaatctattattatctgatatattatctttttttttttttttcagacggaatctcgctctgtcgcccaggctggagtgcaattgctcaatctcatctcactgaaacctccgcctcccgggttcaagcaattctcctgcctcagcctcccgagtagctgggactacaggcacccgctgccacgtccggctaatttttttgcatttttagtagagacggggtttcaccgtgttagccaggatggtctcaacctcctgacctcgtcatctacccacctcggcctcccaaagtgctgggattacaggcgtgagccaccgcgcccggcctctaatatattatctttatctttaaagcaaaactcacactaagaatgctctaagaatgctttttgttgtttttgtttttgtttttgtttttgtttttgtttttgtttgagaccgggtctggctctgtcactcaggctggagtacagtggtatgatctcagctcactgcaacctccatctcccgatttcaagcaattctcctgcctcagcctcctgagtagctgagattacaggtgtgtgccatcacgcccggctaattttttgtatttttagtagagacggggtttcaccaagttggccaggatggtctcaaactcctgaccttaggtgatctgcccgcctcagcctcccaaagtgctgggattacaggcgtgagccaccgtgcccggccttgtttcttaaggtattggtacatcaggacatttcctgggtctgttcattaaacacgattaacttgtttgttcccttaactgtaaatttttttgttaaaaaaaatcagttcaaaataatccttatgctgaagaagtatatttggggcagcatattccggtctatggtcatattttggggtggcatattctgatctcctacaatttaaaggtataatttaaaaataaaaataaaaatttcagccagatgcagtggctcacacctgtaatccctgcactttgggaggccaatgtgggcagatcacttgaggccaggagttcaagaccagcctggccaacatgacaaaaccctgtctttacaaaaaataacaaaatttagccaggtgtggtggcgcacgcctgtaaacctaactactcaggaggctgaggcaggagaatcacttgaacccgggaggcagaggttgcagtgaaccgagatcacaccactgcactccagcctgggttacagaacaagactccatctcaaaaaaaaaaaaaaagaaagaaggaaaattttggatgtttctaacccctcctgctctctagaggttctataaacctgcaaccctctttttttttccccagtactgaaataggtcttggctgtacacatttgggggcaagcagggagcagggataaactgacctgcaaaaccagagacagaaaagttgaaggtctgcaactgggaggggatcaaaggaggagatgaaggagccaacaaaacaggttctagatgggagaaagcaacccccatagagaggtcaagagggatctaagcaagttaagacttttgagatatggggtgtgtgtgcatttgtgtgtgtgtgtgtgtgtgtaaatgccctcccccacctctttcaggggtcactgagtaaagtttacatcactcacactgaagctgtcctcacaagtttgacaaaaactctggataggaatacaggtataattaagcattaatcgggctgctctttggcccagttccttgtaacctaaaatcacctaacactcagtactgaacatctgcatttccatgttcctacagataggatctctgacattagaatcatgagacttctgtttaagaattgctgaagatggccaggtgtgttggctcatgtctataatcccagcactttgggaggccgaggtgggtggatcacctgaggtcaggagtttgagaccagcctggccaacacagagaaaccccatctctacaaaaatacaaaaattagttgggcatggtggtgcatgcctgtaatcccagctactagagaggctgaggcaggagaattgctggaacccgggaggcggaggttgtagtgagcccagattgcatcattgcactccagcctgggtgacagagtgagaatctgtctcaaaaaaaaaaaaaaaaaaaaaaaattgctgaagatgtttctccaatcctgaattccaatggaacagctgatgccaaccagtttgaaggttcccacggagtaatcaaattagcataagaatgcagtttcttcatttccctgtaggtgaattcaccttgcaccaatcaatgatcagttccctccaaaacccttaaaattcctagccccaaactcctcagggagatggatttgaggtttcctctggtctcctcattcagcagccctacaattaagcctctttctctgctacaacccagtatctcagttactggctttccatatgcacatcgagcaataaacctactacggttataacttgtgttttaagtgaaaatgaattctttggggagactgtgaagagctgccgaggactgcacacagactgacacagcacagagcaaagggagcctcaaagaatttggtgtcttcataaatctacacaaaaccagatggaaagaggccagaatgggtcctggtcatctctgggtggtgactgatttaacaggtgattttttggttgctttgcgactttttaattttttatgcaacaggcattgcgatattgagatatgatatgaaaagttgtttgatattggtccccagttcctggcacagagccctaatgtaatataataaattaatatttgtcttttgtccccagctcttgaaatatccctggagcaacaaaagttaaaggaacatcttttgttatcaaaacaagcctgtttcaaccacacaggagtttaagttaatgagtgacttttggaaagcccctaaggaggggggctggatgccaggggaaccaagcatgtgattagagaagtagaactttcagccccacctcctggcctctggggagggaagagaggcttgagattgagtttaatcaccaagggccaatgatgtaatcaaccatgcctacataatggaagcaccataaaaacccaaaggacccatcaaggtgttgggaggatggtgcacccgaaagcacgtcaaagctccccacacttctccacacctcaccctgtgcgtctcctccatcctgccaggtttgttttgttgttgttgttgttgttgttgtttgttttgttgttgttgttaagaaggagtctggctctgttgccaggctggaatgcagtggagcaatcttggctcactgcaacctctgcctcccgggttcaagcgattctcctgcctcagcctcccaactagctgggactacaggcacccgccaccacacccggctaatttttgtatttttagtagagacagggtttcatcatgttggccaggatggccttgatctcctgaccttgtgatccacccgcctaagctcccaaagtgctgggattacaggcgtgagccaccgcgccctgcctgttttgagttttgttttgttttgttttttgagacagcgtctcactctgtctcccaggctggaatgcagtggtgcgatctcagctcagtgtaacctctgcctcccaggttcaagcaattctcctgcctcagcccgttgctgggattacaaattgctgggattacaagtgcccaccaccacacctggctcattgttgtagttttagtagaaacagggtttcactgttttggccaggttggtcttgaactcctgacctcaagtggtctgcccgcctcggcctctcaaagtgctggtattgtagcaatgagccactgcacccagccatctgctgttttttagttgtattcttttataataagctgtcagcctggtaactcaactgttttcctgagttctgtgagccattctagcaaactatcaaatccaaggaggggttgtgggaactcctgatttataaccattggccagaagcacgtgaagcgcagacttgtggctggcattgcagtgggacagtcttaaggaattggaggctgcagtgagctatgatcacaccactgcactccagcctgggcaacagagcaagaccctgtctctaaaagtagatagatagatagatagatagatagatagatagatagatagacagacagatagataaaattttaaaatgaagtggggtagtattgtagagttaagccattaacctgtatagtcttgcaataggagttccacaggactggttttgcaaggtacaggtcacgaagacccctctgataaaacgagatgtggtaaagaagccagccaaaaccaagatggtaatgaaagcgacctctggactgggcgcggtggctcacgcctgtaatcccaacatttcgggaggctgaggcaggcatatcacgaggtcaggagatcaacaccatcctcactaacacggtgaaaccccatctctactaaaaatacaaaaaattagctgggcctggtggcacgtgcctgtagtcccagctacttgggaggctgaggcaggagaatcgcttgaacctgggaggcagaggttgcagtgagctgagatcgtgccactgcactccagcctgggcgacagagcaagactctgtctcaaaaaaaaaaaaaaaaaaaaaaaacaaaaagaaagcaacccaacctctggtgtccttactgcttattatatgctaattataatgtatcagcctcgtggtcagcaacccatttttgggtcccctctcactgtcgagagcttttctgtccctcaataaattctattctgccttactcactctctgctgtccatgtacctcatttttctcagtcatgggacaacaattcggaactcattgaactacgggggtaaaagagcataaaaacttcttagtaattttccaccaatctccctaccctgttccttggctataaatccccaattttccctattgtagagagagtgaaacccagtctctctcctctgctacaaaaccccaatgtaatagctcccccttgaataaagtcttccttcatctttaacaagtgtcatgagtaatcttttctttaatgccacactgacctgggcaggacattcagcacctcccccaagctctgggaagggaaaccagcagtgactacaaggatgcctgtatggggccctggaccagacccagacaatcttccagggcaggcaccccttccaggttaggggcacaggctctggatctgaattccagccatgcaacttaccagctgtgatcttgcaaaaatgattcctctctatgattcagtatctttgttaccaacaaagctggtccccagaaaatggagcctttccccgtttggtgttacaaatcaatatgcaaaactgaaagtgaatgtcaagcagtgcaggctttagattagacggtcatggaattgagaagtgggagcttgggctcggctcctgagagccaggaagtcacagatatagggcacctttaatgaaagggttggatattaaaagtaaggggaggaatattcatttcttttctgggaatgggtggagaactccttgaaactggagtgccgtcttcctttttgtgtttttgtggtttcttccggtcttagtcacagtgattgttaactgtcatggtgctggtgggagtgtcacttagcacagaaattagttataatgaagttagaggttcttcagaggtcaagtgagctgccttggatcccacaagtcttagccagtttggtcagaagggggagcttttgacctcaagcatcctgtttcctaaagataagcagaattaaggcagggtagaaattcacctatgtcacacaggcattacactgggtaacatcctcatctgtaaaagaaaataacaattctcgccaggcacagtggctcacacctgtaatcccagcactttaggaggccaaggtgggcagatcacctgaggtcaggagttcaagaccagcttgggcaacatagcaaaaccccatctctactaaaaatacaaaacttagccaggcatcattgtgggtgcctgtaatcccagctactcaggaggctgaggtgggagaattgcttgaactcaggaggcagaagttgcagtgagccaagattgtgccactgcactccagcctgggctacagaatgagactccatctcaaaaaaaaaaaaaagaaaagaaagaaagagggaaggaaggaagggaaaggaaggagagagagacagaaagagagaaagaaagaaagaaagagagagaaagaaaggagggagggagggaggagggaaggagggaaggaaggaaggaagaaaggaaggaaggaaggagggaaaagaaagaaagaaagaagaaaagagaaaagaaaagagagggagagaaaagcaggaggaaggaaggaaggaagggagggagggagggaggggagggagggagggagggagggaatttgtttgaatcttatgttgtgtgctgtaatgagattgtccacagtagcactggcctcccagaccctctccaaatatgcacggcacatctgagctccggagagaattggggtgcatgccccaaatgctggcctccatcaagaaaacagataacccctttataagagcacaatcatcccagaggttcctcgctcaggaaacctggtccctcttgggtggccaggcagcccagcaggaagagggccaccaccgctatcctgccaggtctctgtctgcagaaggactaatgagctttgtcaggattccatgggacagggtgtgaaacactcagctaagctcgtagcaagagctcaaccactgtaaatttcacaaaataaaaaaaaaaaaaagaccgtacaaaactcctctcaggaagagttttatctatggtagagggacagctgctaagctgtttggggcaaaggatgaaatcgatgccccccactgccccggtgcatgctcaggtggcagtatctgtcttgggctaggcaagtgaaaagaggagagaatttcaccttgttggcccaggaagggacacagtttgggtgagtgaatactcaataagccacttgagcaggaaaaagttccctcgacatccttggcccggctttggtacatatgaccatcaccaagctgtcttctaaactgggagcagggagagaaatatgcaagctcacagcagagctaaatcactgggaactagagatgctggaggcgggggcaggagacaaagaaatgaggcaggtggtggcagagaaggctggaaagaacagccgttcctgtgactagggcctgccatgtgtgtgccagcaggctcgcttcagcctagcatcctgctgagcagcactgtccagtaggaatagaacgcacaccacacatgcaactaaatagctcctgggggctcccaggagccacgtttctttaaagtaaaaagaaacaggtgaatttaacttaatagtatattttatttaatataatagatccaaaatattcttattttaataagtaattcatataaaaagtattgtgaaggctgggcacagtggctcacacctataatcccaacaatttgggaggctgaggcacgcgaatggcttgagcagaggagtttgagaccagcctggccaacatgctgaaaccccatttctacaaaaacatacaaaaattagccgggctaattcggtaatgtgcgcctgtgatctcagctactcaggaggctgaggcagcagaatcgcttgaacccaggaggcagggttgcagtgagctgagattgcgccattgtactccagcctgggcggcagagcaagactccatctcaaaaacaaacaacaacccgggtgcggtggctcacacctgtaatcccagcactttgggaggccaaggcgggcagatcacgaggtcagaagttcgataccagccaggccaacatggtgaaacgccgtctctactaaaaatacaaaaattaggcgagcgtggtggtacacacctgtaatcctagctacttgggaggctgaggcaggagaatcacttgaacccgggaggcggaggccacagtgagccgagatcgcaccattgcactccagcctgggcaacaagaacaaaactctgactcaaaataaattaatcaattaatataacataatataaagcattgtgagactttacagttttttttcatgctcattcttcagagccctgtgtgtttttacacttacagtgcatcctcattcagactggccccatttccagggttcagaagccacaggtggcttgtggctgctgtggccctttgagagttagaattaatttggggaagatgggtgggtgcagaagagaggggaggctgcccagagaggcacctccaggtgacatgtgcttggggccagagctgcacactggggacagctgagtgttggggggtgtgcagaggtgtggctgaaaggggatgagcagtgtgtcccaactggtgagggttgtcaccacacggcaccagccctctctgcgtttcctcctgtcctctcacagtgaaagtgaaggacttgatgagtcttgctgctcgattactgctggatgaactcttggagacagcccttatatgagttacactagtttaaaaaatgaaatgaaatgaaatgaaaggagggctagaggacctatgcctaggtccaaggcagactgctccacccaaacacacctgtaagcttgtcccaggaaagtggccagatctgaactgattgccatcaaacatgtctaatgctcttccctccatctggaacatccacctgccctcagctagagaacacctccttcagtgcccggtcagaatatagaacccctctgtgcacctgtgtctggcacctcctccacgcttcctgggcccctggttccttggagtgctgtctgaaccctcgctaggctgtgatctccttgaggcccaatgccaggcctggccttctccacctccctaggctgcactttgtatcctctcccacccacctcggcagttgagtccgcagttgggccacctggatggccctgcccggggaagaggaaccaagggctctggtctttatctcccttcctaaatgaagtttccccccatctataggagctcctgcaggactccctgaaaaaggaggaaagagaggaggggaaggagtgggaagcaggatggggaagacagatgctctgccagcaaagaggcaaagaggaactgagccaagtccccaccgtgggttggcataagtgggtccctggcaaggggagggaaagtaagaacaagaagaaaggctggccgggttgggaggtggcggtaaaatataaccgccatacacacacaacacacactagccataagggtacagctcaatagatttttgccacctggatcaagaggaaggtcatttccagcaccccataaggttcccccatgtcaggccgggcgtggcgcagtggctcacgcctgtaatcccaacactttgggaggccaaggcaggcagatcacttgaggtcaggagttcgagaccagcctgaccaacatggtgaaaccccatctctactaaaaatacaaaaatttgcaaggcgtggtggtgggtgcctgtaatgccagctacttgggaggctgaagcgggaggatcacttgaacccggaaggcggatgttccagtgagccaagatcgcaccactacactccagcctgggagacagagtgagatatcatctcaaaaaagaaaaaaaaaaaagtttcccccatgtcccttcccagcatctaccctaggcaggtttgaagaattgatgtattgccagcagaaccccagctgatgcccgacctgcacatctcatcattaccctgtgcaggctgcagatcaagctgcaacaggcccgggtctccctccttctccaagtggtaagaacagcagccttcattcactgggaccttctatgtgcatgggagcgggggagggggaactattctagtcacttacatacgtgggtcgttaagtcccaaataaggaatgcaagaaatgtggcattaattggactttctttaaatcaagtgagatccttgccaattaacatcccactgggctgctcagaaatccagccttggaaatgacaggggctccagccctccccaggattctctctcgctcacaaggttttctagagcaccagagctacaaggagcccctagaccagatcatctatctgccttggttaccatggagatgtctattttcccagagggtgcaatcccttcctggagggagattctgctgcttccgtgccacgttggtggccttggagaatcttattgaggtcgagggtcccaaggtgtcctacacagccatgcccttgtcacatcccaaggagatcaccatggagaggtgcccacctctgtcccatcctcattcagaggggctcactcctgtcccctgctgctctcggaggctctctctctcccttcccctctgggaaactggtataatctatatagtggtttcataactttacatttttatccggctgtacatagtctcctctttaaatcccctcaacagcctatgagaagggcattattgtctctgtcgtacagaggagaaaatgcaggctgggaggggctaagtcgcccaggcaacaagatggagatgatattcagatacagacactccagagcctgtgctttgtaccctgcccttggctgcccaggtgacagcatctcaaagccaggagcacactaataaagaagccagcattaacagcaggcatgcatgccactttcaaactaattactcctgcctccatgattactcctcaggctcctggggctggggtaacctcccacactggaaggtagacttcggaagacccttctggaaatgctcccaacttgggaaaacagcgcttcagacttcagacccaggaagagatcacccagtgctccttttatggggcatacaactgaagccaagaggtaaaccaggtcacccacaaagctggtggcaagtcaagaactgagtctcaggcctggtgcggtggctcatgcttgtaatcccagcactttgggaggccgaggtaaaggattacttgagcctagcagttcaagaccagcctgggcaacatagtgagacctcatctctaccaaaaatttaaaaaattagctggctatggtagcacatgcctgtagtcccagctactcaggaggctgaaacggatcacttgagcctaggagttcaagtctgcaataagctataatggcaccattgcactccagcctaagtgacaaagccagaccctgtctcaaaaaaaaaaaaaaaaaaagaactgagtcttggccgggtgttgtggctcacacctgtaatcccagcactttgggaggccaaggcgggcggatcatttgaggtcaggagttcaagaccagcctgggcaatgttgtaaaaccccttctctacccaaaatacaaaaattagctgggcatggtggcacctgcccgtaatctcagttacttgggaggctgaggcagaagcatagcttgaactcaggaggtgaaagctgtggtgagccaagatcgcaccacttcactacagcctggacgacaaagcgagattctgtctcaaaaaatattttagtgtgacaaaatattgcatgcacactgggaaggacagctccaattcattcattcaaactctctcccaaaaccctttccagcagaacaatgtccgtcagggcaaagtgttgtgggatgtcagggactcccaacagagggacccgctgaagccatggcagaagaacataaattgtgaagatttaatggatatttattagttccccaaattaatacttttataatttcttacgcctgtctttactgcaatctctgaacataaattgtgaagatttcatggacacttatcacttccccaatcaatacccttgggatttcctatgcctgtctttactttaatctcttaatcctgtcatcataagctgaggaggatgtatgtagcctcaggaccgtgatgattgcattaactgcacaaattgtttgtagagcttgtgtgtttgaacaatatgaaatctgggcaccttgaaaaaagaacaggataacagcaatgttcagggaacaaaggagataactttaaactctgactgcccgtgagccgggcagaacagagccatatttctcttctttcaaaagcaaatgggagaaatatcgctgaattctttttctcagcaaggaacatccctgagaaagaggatgcgtccctgagggaggcctctgaaatggccactttggggacagctgtcttttacggtcatcgctgagggatgaaataagccccggtctcctgtagcgctcccaggcttattaggacgaggaaattcccgcctaataaattttggtcagaccggttgtctgttctcaaaccctgtctcctgataagatatcatcaatgacaatgtgtgtctgaaacttcattagcaattttaatttcgccccggtcctgtggtcctgtggtcttgccctgcctccatttgccttgtgatatcttattaccttgtgaagcacatgatctctgtgacccacaccctattcgtacactccctccccttttgaaaatcactaataaaaactcgctggttttgcggcttgggggacatcatggaacctgccgacatgtgatgtctcccccggacacccagctttaaaatttctctcttttgtactctgtccctttatttctcggaccagccaacacttaaggaaaatagagaagaacctacgtgaaatgtcgggggtgaattttgcctgatagtaaaggttcccaagttggctgactggggccttagcttctcaaaaggggaagaccatgagactgggatgcccatgacctagccatggttcctccttcctgatgtcaaggaaaccaaactattaatcaagtttatttagtaaatatagaatcaaaacaaagtatcaggccaggcacactggctcctgcctgtaatcccagcactttaggaggccaaggcagggggactgctttaagcagttgaggctgcagtaagccatgatcatgccactgcattccagccagtctgggtgacagagtgagaccttgtctatatatatatatatatacacatacatatatatatacatatatacacaaatacacacacacacatatatacacacactcatatacatatatatatatatacacacacatacacatatatatatcaggtacacctagcatttcctccctcagagtttttctgagttttctggtgggcacatgccctgccccacagtggactccttcctaccctctgtcagccagaatgctgcctccccagaggccttctctgaccaccccatctgaaggagcctggccctttcacatcaccctgtttacctcctttttggcacctctcacaatctgtcattatccttttttttttttttttgagacatagtcttgctctgtcgcccaggctggagtgcaatggcgccatcttggctcactgcagtctcctcttcccgggttcaaataattattgtgcctcggcctcccgagtagctgggactacaggcacacgccaccacgcccagctaatttttgtatttttagtagagacagggtttcaccatattggccaggctggtctcgaactcctgacctcgggtgatccgcccacctcagcctcccaaagtgctgggattacaggcataagccacagcgcccagcctcattatcttattatttgtttagtggctctctctcccgctggccttcaactccacaagggcagtgaccctgactgtcagggacataaaccagcagtccatgggcatgcatatttttgtttggcttgcagtgttgtatcaaaaattcaatttattcctgtaatcccagcactttggaaggccgaggcaggcagatcacctgaggtcaggagttcaagaccagcctggccaacatggtgaaaacccatctctactaaaaatatttttaaaaaactagccgggcgtggtggtggatgcctgtaaccccaactactcgggaggctgaggcagaagaattgcttgaacccaggagacggaggttacagtgagccgacacagtgccactgcactccagcctcggcgacaaagtgagactctgtctcaaaaaaaaaatcaatttattggcaatatttaaaaatcaagagattttatgtaaacacctggatttcctggcactcttgaaaaagatctagcacaatgggctggaggtgagcggccactgcagcccgtagttcttactccagcccccagtccaccccattacatcacacttggctgtttgcactccttgatcctacttacctgcctatccccggaggcctttgagtctaaaattcctggtctcttttcaccactctacttacccctacaactgagtgttgaaataaataaactgaaagcaagaaaggttgactgttttgaaggaaatatttcatctaaactctaggaaggctctactccacacaagctgtgccacatgaaggacgccctctggtgccagaattattctcgggggggcccagaaccagttactataccttgaactcatgccaatgagctgggcacactttttccttagatggattaatctaatctaaatgaaaattttagatcggattaacccactttagaataaatctaaatggcaatctaaattatgcggttaccgttttgattatattattgtatgttgattaatcaaagtgccgccctaaatcccgctgtgactccgtgggtagtagggtgggtaggtaggtgggtttgacacaacggggatttctcgtgtttgggaggctcatcatctaaatcctctctaaggagtgttcatttaccatatgaaactccccttttcgagaagacagggatgcaacagggtcaagaaggtggaacgtaccaaaggacacagtgcgtaggcgcgctcgaaacctgggccggtattctcggcacccagacaccgtccactcgcactgcgcaggctccgagacagatcaagctttccctccccctcccagctctcctagagtcaagaggacgccctcctgccgcagacttcctgcgcaagcgccatcccatgtccccgcctccaaaccaattggaagcggcgccgcctgggcgcttggggcacgacgctgtgggtggggtcaggacgtgagggcagcgcgctggcgtcagaggcgcggctatataactaaacacaggcaccgcccctctgccccagtcactgagccgccgccgaggattcagcagcctcccccttgagccccctcgcttcccgacgttccgttcccccctgcccgccttctcccgccaccgccgccgccgccttccgcaggccgtttccaccgaggaaaaggaatcgtatcgtatgtccgctatccagaacctccactctttcggtaagctatgggaaaggtcgcgggcccgggtggggcagcggggccttccgggcccggagacgtgttccgggaagttgccaagcgctccgggccttcgtaagctcgggcaggggaaacttgaccagggtcgcagggcagcgggatcaaggcctgggccccggggtcggaccctgagcgcgaccggaaggagcaggcggtaggtcagcccttgggcgggcccggcgtctcagtggcgcatttactaatggctcctgggcctcctcgggccacacccgcccctcccgtcaccattgcgtcacgtccgttacgtcaccacccgttgtcacggatccggagggaaaggcggtgccagccctaagtggcaagcgggtgcaccaatgggggtgggaggcttagccccgcctcgggagctcgggttccggcgggttgcatcagctgggtggggcaccgcctggcagcccggactcccccgacatgtgatcggcttcccagggagggcgggaggcccgggcgttccccgagcctggggaagctggccgtcccggactgacctgctcggggagagccagcaaaggacacattcggcctggcccaagccctgacgatttcagtgttgttttctgcacgcgcaaaacacctggggaccgaggggatggcagtggcatcctatctttgacagctctgaacgagcttaaccttttttttcagacccctttgctgatgcaagtaagggtgatgacctgcttcctgctggcactgaggattatatccatataagaattcaacagagaaacggcaggaagacccttactactgtccaagggatcgctgatgattacgataaaaagaaactagtgaaggcgtttaagaaagtaggtcttcagtgagattttgggaaagtcataatggatttgtccacaagggggtgccagctgtgttgtatgtattgttagcggaaggggtgataaatgcgttcatgctcttgctaggcctaattcgttttcctttgtgcttgcagaagtttgcctgcaatggtactgtaattgagcatccggaatatggagaagtaattcagctacagggtgaccaacgcaagaacatatgccagttcctcgtagaggtgagttcagtcactacttgatttgtgcctctctgctggcaaatctcagatcctgtctgttagcttctgctggggacataaaagttggctttgtaaggctgagcaaaacctcagttgggttttaaagtacatagacttatttctgttttataggaaaaagcagaagggacttgtctacctttggtttactgtttctgtggatctacttcacagatgcaaatttgaatagcatatagatgcattgtaaaataagccaaatgctgggttgttcctgtatttgtaaggacatgagtttttaaaaatgaatttcctgagtattaatactaaaatactgttacatgatcagctcttgatataattgaagagatttcagatacctgatgagtctcattctcacactaattcagaaccttggaaggcactgagtgttcaaaaaaggtagctcttaactgaggaccctctgttgaaccattgtgcgcacccctggctcttgggcagtgtagtagcaggaagacagggttgttgccattagaaatggaggctttaactctccctgtcccccatttaaaactttgcccttttgtcttttcagattggactggctaaggacgatcagctgaaggttcatgggttttaagtgcttgtggctcactgaagcttaagtgaggatttccttgcaatgagtagaatttcccttctctcccttgtcacaggtttaaaaacctcacagcttgtataatgtaaccatttggggtccgcttttaacttggactagtgtaactccttcatgcaataaactgaaaagagccatgctgtctagtcttgaagtccctcatttaaacagaggtcaagcaataggcgcctggcagtgtcaagcctgaaaccaagcaataccgtcatgtttcagccaagcccagagccctaagattacaaacaactatggccggaacctcctcagctctccctctgcagagttccctaccctaagagaatgttaccacctgaacagtcctcggtgaatctgagaggagaggatggggtaaggcagaagcaccagctgtactactagaagggagcttttggtggtagatcccctggtgtctccaacctgactaggtggacagagctcaaagaggccctcttaccgctagcgaggtgataggacatctggcttgccacaaaggtctgttcgaccagacatatcctagctaagggatgtccaaacatcagaatgtgaggccaaccttctatcagagttaaacttttgacaagggaacaaatctcaaactgatccatcagtcatgtagctagctgtagagcttgcaacttaatagcagcagctgcccaatgccatgtgaagtaacaaactggtttttggtttttttttccccttcagttttaatgttatgtgtaatgtatttaaacccttatttaaataaaacttgttttcagaaatacctgacttgcagattatttatatatagtcgatcttgtgcatataaaggaaccatagaaatgggcagtggaggattcgtccacacccacagcttctcaacgggcctgaatttggccaagaaaaacctttatgagcttgtccctctctggtcaactggttttttgttcgtttgttttttgagacaggtttgcccttgttgcccaggctggagtgcagtggcacaatctcggctcactgcaacctccacctcaggttcaagcaattgtcgtgcctcagcctccctagtagctgggattacaggcaccatgcccagctaacttttgtatttttagtagagacagggtttctccatgttggccaggctggtcttgaacacctggcctcaagtgatctgcctgtcttggcctcccaaagtgctgggattacaggcatgagccaccatgcccagcaggtcaactgtttttgcaagcatttagccagagtcatgctgtgctgttaatcagtgtcctggagaatgggttgcttggaaatcttggcgccccctcagtagtaacagccttggtttaagggcgcagagtggagagtaaatgcaagggctataacaagggcattcatgctgtgggttaagatccacaaatcgctaggaatgtgtatactctgggtagtaagtttgtagtattagaaggtttaatgacaagtatttgaagagctgaagttaagtgttgggaggccatcccttatgaaggacaatgaatggcaagtaaaagaccaagttctgttcctgggtccattaatttagttaaaaaggcaaagttctttcagcacacatatctgcatgcagtcacgtgctgcctaaggatgcttcattcaacaatgagcctcacagccgtgctacacaataagattataatactgtatttttactgtaccttttaacattgtgttacaatggcctacaagaagcttgtgtggatggctttgaatgtggcccaacacgaactaataaattttgctaaaacatgagttttgtttggtgacttttttttttttctttttagttcatcagctattgttggtgtattttatgtgtggcccaagacaattcttccagtgtggcccagggaagtgaaaagatacgacacccctggcctacaatttcagcacagtaacgtgctgtacaggtttgtagcctaggagcaacaggctgtgtcatataacctaggcatgtagtaggctgtgccatccaggtgtgcgtaagtacacgatgatgttcgtagaaaacacaaaatcgcctaacgatgcgtttctcaaaacatgtccctgtcattgagtaatgcaagactactaagtttactaccagcccattttgtagataaaggtacaagcggtgagttaggttagagcccaggttgggaaagagcatagaaccaggtgagttgtggaggagggctggtgaggttgagccaatggcaactgccctaaaactaggaggtgattgtgttagaatacagcagactgaataattgatagagatttatttggctcacagaagtcgaaaggcatggcattggcatctggtgagggccttcttactgcatcataacatggtggaagggctggacagcaaatgggggccaaacctatactgttgtgagcccacttcattcatgagggcagaggctcaggacctaatacctttaaaaaccccaccttggccagccacagttgctcacacctgtaatcccagcacttgccaaggggggtgaatccttgagaccaacctgggcaacgtggcacaaccctatctctacaaacaatacaaaaattagccaggcatgatggcacacacctgtagtcccagctacttaggaggctgaggcaggaggaaggacgatcactggtgcccaggaagccaaggctatagttagctgtgatcatgtcactgccactgtactccagcctgggtgacagagtctccaaaaaaaaaaaaaaaaaagcgccccacctcccaataactgttcaattggcaattaaatttcaacatgggttttggtttgggtggagcattcaaactatagcaatgattctaaccccagcatcaggagcttgtcgtgttaaaggtcctacaaaaccagtctgtttcatgaacacaaaataatttagccttggagccaaccaaggctccaaatacagtggcattgttcaaaatatttgagtgaattttttttttttttgagatggagtcttgctctgttgcccagactggagtgcaatggcacggtctcgcctcactacagtttctgcctcccaggttcgagcgattctcctgcctcagcctcccgagtagctgggactacaggcacgtgccaccacgactggctaatttttgtatttttagtagagacagggtttcaccatgttggccaggatggtcccgatctccttgaccttgtgatccgcctgcctcagcctcccaaagtgctgggattacaggcatgagcaccgtgcctggctgggtgagacttttaaatcagtaagatttgactgtaatgtaggaggttttttcttggaggaacttctagagcaaggcgggaggccaaacacacaaaatactacaatcaggatgaaacagcaagagaagagaattccttctatgctgtaggttgtgaacacggccaggttctgtgctaggctgttccatctcatgctttttaaggacctccaattctctaggatgggattattccaagttaaaccatcaacatctattaaatcagctctgtgaagccaagcgaaacaagtatctgtgaacacagaactgaggaagttggtgaacacccttatccacctgatgtaacctatctcaggctgaatgaagaaaagtataattaaaaagtcatgatgggccgggcgcggtggctcacatctgtaatcctagcactttgggaggccaagacaggcggattgcctgagctcaggagttcgagaccagcctgggcaacaacggtgaaaccctgtctctactaaaatacaaaaaattagccgggcatggcggcgtgcgcctgtagtcccaggtgggaggctgaggcaggacaatcgcttgaacccaggaggcagaggttgcagtgagccaagattgcgccactgcactccagcctgggcaacagagcgagactccgtctccaaaaaaaaaaaagaaggcatgatggctggttatggtggctcatgcctgtaatcccagcactttgagagaccaaggcaggcagattgcttgagtccaggacttcgagaccagcctgggcaacatgactaaaccctgtctctacaaaaaatacaaaaattagccaggcgtggtgttgcatgcctatgctcccagctactggggaggccaaggtgggaaaatggcttgagcccaggaggcagaggtcgcagtgcgccaagatggcaccactgcactccaacctgggtgacagagatagacactgtctcaaaaaaagaaaacaatgtgatgtggacattcccaaggtaagttgtggagcctcatctagaacccaggactccctgtgtacccctcctcccaccagctgcacctgtacattcacaatttctgtaactcattttcccggtggagtgggagcagaaataaataaataaatgctcatcttacagagattgttgagtgcttggtatctgtagtacactacagggcatgtcaggcagaccccctgcactcagggagctgactgcctggtaggtagatgtaagaccagcacacagccttgacgcaggacagaaagggacccaaagagccacaggatctctgaggactgcgaaatcttccccactcccatcctcagccaagggggccaagaaggcttcataaaggaggtgctgtctgaagccaagcatttcgagcagagaaaaagagtcacacccagaggtgaaaaggcacctggaagccggcgcagtggctcacgcctgtaatcccagcacttagggaggccaaggccagcagatcacttgaggtcaggagttcgaggccagcctggtcaacatggcgaaatcccatttctactaaaaatacaaaaattagctgggcgtggtggcgggcgagatcgtgccactgcactccagcctgggcaacagagcgagactgcgtctcaaaaacaaaaacaacaacaaaaaaaagaaagattgattatgctgaaaaggtccctcagctctctgctccttagtcctcctctcccaccccaaacccccccagccctcctgcccccatccccacacgctgcaacagctacacgcaaggacaaactgagtgtttcttaagatggtgttatgaagacaaaatgaaaactggtcagctaaaactgcataagaagctacaaaacaactttagaacctattccaattgctgtcaactctatgaataagccagaaaaacacatagcatatttggagaactgaacatgacccccttcctggtttatcagcctcgatggtgcccccttgtggcagtagtgtaaaaacacagtttactgtgcacaaggctttacaatttttcaattaagagctccttgaccaatttttaactttttttttggtggggggacagagtctcactctgtttcccaggctggagtgcagtggggtctcctgctaggcaccatgcacccttgttgccccctcctgctcaagcctctcatttcttccactctctaaatgcaagcgttcccaagggattgtcctgactgtccttccctctcccttggtggtctcaccctatatcatggctttgtttgtcttcagtgttcctgatcctaaggctctgtgtccagctacgacttctcgtccaagtccagactccatcgatagctctttgccgcgttcattcattcattcattcattcatgcctatggagcactcactcagtgcaggtgctgtgccaggtgtgggggcccagtgatgaacaagagaaaccacactcctcgtggggtttgcagtactgcagtcggagagtcagattctaaaccaatcatcgtataaatactgaagaatttaaactgtgtttagaaggggccacattcgggtctgtgacagggagaggcacaatctctcttcttcctgcttttttttctccatagcacaactatatgacctatttgtagggcaacaatataatttatttgttcatttgattttggccatcttcccccactagaacataagttctgtgtgggcagaaacctttgtccagggctgtatccccagtgcctgcaagagagtctggcacatactaggtgctgaatacgtgtttattggatgaatgaatgggtcagactacgcgaagtttaaaatcgacagagttaccctctataaattatgtgacttgctagggccaggcacggtggctcacgcctgtaatcccagcactttgagaggccaaggcaggcggatcacttgaggtgagaggttcgagaccaggctaggcaacatggagaaaccccgtctctcctaaaaaaaaaaaaaaaaagagagagagttatgtgacttactctctcccctttgcatccctacttggtagagccggagggaaaggctggaattacatcagtagttctcagagtctggagactatgttagttgcctggggtgggggtgggagagaagagatgtatactactggtatccagtaagaagtggtcagagatgctgctaaacatcctgtgacccatggaacagcctcttacccccacacaaataactatctggcccaaaatatcaacagtgctgaggttgggaaaccctgggtcacatgaacctctgggaactgtcataaacccgggcaagcttttcagagtcacccacgtgactgccttctatcctgtgtcccgcagccaagcagctgctgtctctctcagtgagtctcaacactttttggacccaataatcctttcccctgttatatcagcaatctagaggactaacttgagaattttagatctttttcatcatatgcctggtatatgctgggaattttattttatttatttatttatttgaaatagataaaggcaggatctcactgtattgcccaggctggtctcaaactcttggactcaagtgatcctcctgcctctgcctcccaaagtgctggggattacaggcatgagccaccatgcccagactatgctaggaattttaagtaaaagataattggttggtaaattatatgatagtttcttccttctctaaagtgcatttaaagtataatctgtggtaatcataccattcaaagactattttgactttctccgttaaaaaagtgacaaaacacagtgtttatttatttattttagatctcccagggactcactaacaaacattgtatatataattggaagagaaagcaagcctagtgtggtggtatgtgcctgtagtcccagctactcaggagactgaggcaggaggatcacttgagcctaggagtttgaggctgcagtgagttatgatcacgccacggcactccagcctggatgacagagtgagatcctgtctcaaaaaaaaaaaaaagagaaaaaagaaaagtgccaaacaaattgaaaagtgatattacattatgtttggttatgagaacacatatatattaaaatgcagatttaggccggtcgtggtgactcacacctgtaatccttacactttgggaggctgaggcggacggaccacctgaggtcaggagtttgaaaccagcctggccaacatggcgaaaccccgactctactaaaaatacaaaacttagcgaactgtggaggtgtgtgcctgtaatcccagttactcaggaggctgaagcactagaatcacttgaacccgggaggcagagattacagtgagccgagatggcgtcactgcactccagcctgggcggcagagcaagactccatctcaaagtaaaataaaataaaatgcagatttagatttcattatgagtgttttattaacactaaagctcattaggatcccctgcttacactcactacattaaaatttgaatttataactcgtgtatttttccctagagcatgatataagacagtttcaggatactcatatccaaggagtttgcgaatagtacgtgagagatgtaggctgtccttggtccccataaatgaaaagccaaggccgggtgcggtggctcacacctgtaatcccagcactttggaaggctgaggtgggcggatcacgaggtcaggagttcaagaccagcctggccaacatggtgaaaccacgtctctactaaaaatacaaaaattagccaggtgtggtggtgcacgcctgtaattccagctactcaggaggctgaggcaggagaattgcttgaacctgggaggctaaagtttcagtgagctgagatggcaccattgcactccagcctgggcaacatagcgagactctgtatcagaaagaaaaaaaagaaaagccaaatcagatataaccgtcactgaattttctctgtcagcattgtttgtgacatcctggagccctcttaatcggttgacctgcgagtctggtgaggctcagtgggagtggctgggtagatcaccatcacttcgccacctgcagcagttctcgcctgagactctgaggcctgagcccaggcttggtatcactgaagggctccctgtttgattcccctgccagccagatacccacacctctcacctaatgcaatgatgctcgatccatactcaattcataactgtcgctttctatgcttctactgtccgtttttgtgtgctccaatgcagatctaaaactgcgatggaatgtgcacttataaaaacaatgccactgtctttttttaaccagtgaacagattgcaatataaagtccactaaagccaggcgcggtgactcacacttgtaatctcagcactttgggaggctgaggcgggtggatcacctgaggtcaggagttcgagaccagcctgaccaacatggtaaaaacccctctctactaaaaatacaaaaattagctgggcgcggtggctcacgcctgtaatcccagcactttgggaggctgagatgggcagatcatgaggtcaggagatcaagaccatcctggctaacacagtgaaaccctgtctctactaaaaatacaaaaaattagctgggcgtggtggtggatgcctgtagtcccagctactcgggaggctgaggcaggagaatggcatgaacccaggaggcggagcttgcagtgagccgagatcgggccactggactccagcctgggcgacagagcgagactccgtctcaaaaaaaaaaaaaaaatacaaaaattagctgggcgtggtggcgggcgcctgtaatcccagctaattgggaggctgaggcaggagaatcgcttgaacccagaaggcagaggttgtagtgagccgagataacgccactacactccagcctgggcaacacagcaagacaccgtctcaaaaaaataaataaataaaattaaaaaaaataaagtctgctaattttatggtctaaagtgctgcatttcaaacttttttcttttttttttttgagactgaatctcgctctgttgcccaggctggagtgcagtggcacaatcttggctcactgcaagctccacctcccaggttcatgccattctcctgcctcagcctcccgagtagctgggactacaggtgcctgccaccacgctcggctaatttttttttttttttgtaattttagtagagacggggtttcacctgtgttagccaggatggtctcaatctcctgacctcgtgatccacccacctcagtctcccaaagtgctgggattagaggcatgagccaccgagcccggcccttttcttttctttttttctttttttttttttttttgagacagtcttgctctgtcacccagtctggagtgcagaggcacgatcccagctcactataacctcagcctcttggattcaagcgattcctgtgcctcagcctcccaagtagctgggattacaggcatgcaccaacacgcccagctaatttttgtatttttagtagagatggggtttcatcatgttggccaggctggtctcaaacacctgaccctcaaatgatccacccgcctcagcctcccaaagtgctgggattacaggcgtgagccactgcatcaggctatatcagactttttttcaagacagggtctggttctgttacccaagatggagtgcagtggtgtggtcatggctcgttacaacttccgcctcccaagctcaagtgatcctcctgcctcagcctcctgagtaactgggactacaggcatgccccatcatgcctggctaatttttgtattttttgtagaggtgggatctcactatgttgtccaggctggtcttgaactcctgggcttaagtgatcctcccactttgccctcccaaagtgctaggattataggcgtgagccactgcatctggccttgaaactgtttaaaatgaagattgttaaaatggagattgattcagtagatctggggtagagcctgaaattctgcacatctatcaagctcccaggtgatgctgagcagcaaaaatctttagttctgtctccaaggtgggcaagtcataatctccctgaaccttatattccccttgtgcttgtttcctcctatatcacagaaatggagcgagaattaataactagacacacaaagggcatcatgtttatgttcaatgttcacttatttttcaacctctgtgctccctctgcttcctgtttttaaccaattgcccattatgggtataaattaaccataaaggactatgattaaagacaatttaaactgtgcagtgacccgggctgctgtgactgggtaacggctggcaagagtggctgtggattgagggagcccgtttggacacctgggtgccgcagggtcacggctcctgcgtgtggacctcctgtccaacaagcactctgttttaaaggagattttttaattttactattttttagagttggagtcttactctgtcacctaggctagggtgcagtgtcaccatcttagctcactgcaacctcctcctcctgggttcaagccattttcctgcctcagcctcctgagtagctgggattacaggcatgtgccaccatgcctggctaattttgtatttttagtagagacggggtttctccatattggtcaggctggtcttgaaaacctgacctcaggtgatccacccgccttagcatcccaaagtgttgggattacaggcgtgagccactgcgccaggccaatttttttttttttttttaagacacagtctcactctgttgcccaggctgagtacagtgatcatagctcactgcagcctccaactcctggtctcaagggatgctcccaccttggcctctcaaagtgctggaattacacccaaccaaaaaatccattcttaatcttagcaactctatcatttttttctgtttttctcaatcattaatctccgattttattatttttctttcttccttattttccttgattttgtggctctttttctaacttcttgagtttaaagattcacacatttattttagttcctttgtttaataatgaatgttttgttttattttgtttgagataggccctggagtgcaccagaccctatcacccaggctggagtgcactagtgcaatctgatcatagctcactgcagcctccaactcccgggctcaagcaatcctctcgcctcagcctcccaagtagctgggacttcaggttcacattgccacacctggctttttttttaagtagagacagggtctcgctatgttgcccaggctggtctcagactcctgggctcaagtgatcctcttacctcagcctcccaaagtgctgggattattgccgtgatccaccattaccggccatgaatactttttaatgctctaaattagatttggtccaggcgcggtggttcacatctgtaatcccagcactttgggaggccaaggcgggcagattgcttaaacctaggagttcgggaccagcccaggcaacatggcaaaatcctgtctctactaaaaaaaaaaaaaaaaaaattagccagtgcggtggtgtgtgcctgcaatcccagctgctcaggagactaacaggggagaatcacttgagcccaggaagccaagattgcgccactggacaccagcctgggcaacgggagtgagagagagcctgtctctaaattaataaataagatttggcaccatttctttgttttgttttgttttgttttgttttgtttgagatagtctcactcttgtcacccaggccagagtgcaatggcgcaatctcaactcactgcaacttccaccgcccaggttcaagcaattattctgcctcagcctcccgagtagctgggcttacaggcacgcgacaccatattcagctaattttttgtattattagtagagacggggtttcaccatgctggccaggctgaggcagaagaatcacttgaacccgggaggcggaggttgcagtgagccaagatcgtaccactgcactctagccggggcaacagagtgagacgctgtctcgaaaaaaaataaaataaaataaaaaataaataaaaatataaaaattagccgggtgtggtggtgagcacctgtaatcctagctacgcgagaggctgaggcaggagaatcgcttgaaccctggaggcggaggttgcagtgagccgagatcgcgccattgcactccagcctgggcaacaaaagcgaaactctgtctcaaaaaaaaaaaaaaaaaaggccgggtgcagtggctcacacttgtaatgccagcactttgggaggccgaggcgagtggattgcctgaggtcaagagttcgagaccagcctggccaacatagtgaaaccccgtctctactaaaaatacaaaaaatttgctgggcgtggtggcaggcacctgtaatcccagctacttgggaggctgaggcagaagaatcacttgaacccaggaagcggaggttgcagtaagctgagatcctgccattgcactccagcctgggcaacagagcgagactctgtctcaaaaaaaaaaaagaatgaagttctgatgtatactacaacatgaatgaatcacaaatgcatcatgctaagtaaaataacccatacacaaaaggccgtatattgtatgattccaattaaatgaaagtctcagaataggcaaattcttggagacagaaagtagatttgtggtttccagggaaaagggggaatgaggaatgactgcaaatgggtgtggggtgatgaaagtgttctgaattagataatggtgatagttgcacaaatgtgtgaactaaaagccactgaagctgggcttggtggcttgcatctccagtcctagctacttgggaggcttaggtgggaggatcattgagcccagaagttagagaatagcctgtgcaacacagcaaaaaacctgtctttggctgggcacagtggctcaagtctgtaatcccagcactttgggagcccaatgcaggaggatcacctgaattcaagaccggcctaggcaatataagaagaccccagccaggcgcagtgactcacgccagtaatcccagcactttgggaggccgaggcgggcagatcacttgaggtcagaagttcgagaccagcctgaccaacacggtgaaaccccatctctactaaaaatacaaaaaattagccagatgtggtgatgggcgcctgtaataccagctacttgggaggctgaggcaggagaatcacttgaactcgggaggtggaggttgcagtgagctgagttcataccactgcactccagcctgggtgacagaagaagactccgtctcaaaaaaaaaagaaaaagaaaaagaacttgtctcaaaaagaaagtaaataatataaaagccactgaagtgtatactttcaaagggcaaaaggtatggtatataaacaatatctaaataaatggcttttttttttttttttggagacagtctcactctgttgcccaggctggagtgcagtggtctgatctcggctcactgcaacctctaccccctggattcaggcaattctcctgcctcatcctcctgagtagctggattacaggcatgcgctaccactcccagctaatttttgtatttttattggagacgggggtttcaccatgttggccatgctggtctcgaactcctgttctcaagtgatctgcctgcctcagcctcccaaagtgctgggattacagacatgagccactgcgcctggctaaatggcttatttaaaaaaaaaaaaaaaaaaaaaaaaagaattgcatcatttccaaagctggctgggtgggcacattatgagcaggggtgttgcccttgccacatggcagcatctctctggctcgtggacagaaatgacctctgccgtctgccagggatcatttggaatcaggtgggtttatatatgcagcaaaacttcagtaaagcttgaagaaacgcactgatccttctaccttctctgaaataacgttctcaatagcgaggtcataggcataaccagccatccaaacctcccccatggccccttgagcccaccatgtgtcactccaacccaccccactcctgggctcaatagacaacaaagaaaagggaagagaaagaacaaagacccccctcgatcaccattgtgtccccagggtcagaacagtgcctgacacaaagcaggcacttggaaaatttgtgttgagtaaacagatgcatggatgaatgagtgaatgaaagagtgaaagcacacggtctctaagcaggcaggagggtctgggatgatgggccctggtggaggggctgacactgaatggggtgacagaacctccagcgatggaggaaaggaggaaaggacggaagcgggacttaggcagctgtgttcacggtggggaaaagggggctgacgtcaaatgaccttgggaatgaaagagaaatgattcaccacagttgccagtaacaaccaagctgcagaatattaatttgcaattgaatcaactggtcactttcggaaacttcctgtcggtttttgcagggagtggcaggagctgaggaaggggtcggggtggcctgtcagggacctgggaccagcctggcaggttcagaagcaggacaggggcagcaatctatgtgcatcacacagaactgagatgacaaaccctgggaggggtaggcgggctgggaggagccagacagtggaggagctggaggtcacagtgaagacagattcagcaggagcgaggcttctggagagggtgggatgggaagctgtgggccgagaagaggcagcagcacatggagtccaagacccgggggttccccaactcagctccctcacctcctacctgttgggccggggatgagccattcagcctggaacacacccgaataaagactcctctcatcctctcacagaggggcctttaggattatttttcccagttaaaaccactgttaggccaggcgtggtggcccatgcctataaatcccagggctttgggaggccaggagggaggatcacttgaggccaggtgatccaaatacaaagcctgggctgagaaccactgcttcgaaggcacaggtgggcatcagaggagaaaaggagagaggaggctcaggagagaagcggaagccagagtaagggtagccactactctctgtccttgacagcccagcctgggcccaggggtggtgggcagcctctccagcccagtctgcaagcagcttgcaggctgccctcttggccctgccatgtcaccactctcagacagcagctgaggccagaacccaagaacccacctccccctacctagccccctaccccaggggggatcatggatgccctcattgatgcaaacaccttccaggtgtcactgtttgtccccagaactaccacatcctccaaagccctggttgcctgggccagaatgattgagtcgtcatcaagctcttccttttctgccatcaataaccaattaggaagccaaggcactgcctccctgacaacggtttgcagctcatcaatagtgatctgtttcccaaagccagccctggcaggcaggagtgtgcctgggtccactgagaagcctctccctcctcagggaacagtctccttcacaggggacccttgtttttctgttactcttttttttttttttttttttttttttttttttttttttttgagacagagtctcactctgtcgccaggctggagtgcagtggcacgatcccagctcactgcaccctctgcctcccaggttcaagcaattctcctgcctcagcctcccaagtagctgggactacaggcacacaccaccacgcccggctttttttttttttttgtattttagtagagacagggtttcaccatgttgcccaggctggtcttgaactcctgagctcaggcaatctgcccaccttggcctcccaaagtgctaggattacaggcgtgagccaccacacccggccgtgtgttactcttttatgcccctagaatctaaactccaccaaagcaatgaaagggtctgtcctgtcatagtcacctgtttttttttttgagacaaagcttcactcttgttgcccaggctggcgtgcaatcgcacaatctcagctcattgcaacctctgcctcccatgttcaagcaattcttccacctcagcctcccaagtagccaggattacagacgtgcaccaccatgcccggctaattttgtattttttagtagagacagagtttcatcatgttggtcaggctggtcttgaactcccaaacttaagtgatccacccacctcagcctcccaaagtgctgggattacaggcgtgagccgctgcacccagcgctgtcatattcacctcttatccccaagtagcctcatctgtaccctagctcacagcaggtgctcagtaattggaatgaatttggaatattcggatggtcagaataactcaaagaacagctcccttctttgtatttgaaaatttacatggaaattcatgctgggccagtttttactaaacagaaaccttcacaaggctgtgatcccttgtatccatttttgattgctaccataataagtcaccacaatttagaagcttaaaacaacagcaatttattctctcgcggttctgtaggtcagaagtcctggtacagagtggctcacggggtcccctgattaggatctcccaaggccacaatcaggtcggcagggctgcatttctttctggaggctctagggatgaatccacttccaagctcatccaggttgttggccagatttcattctttgtagttgcggggctgacattcctctttcctggctgtcggtggagaacctctcagctcctcaaggccactgctttcctcgtcctgttgccctcctgccatcttcagaccagcaattgcttgtggagtcctcataactccagctctccgacctgaccttcagccacatctcttctgcctctagctgaagaaagttaagggctatgtgattacactgggcccagtcagataatccagcataaactccctaattttttttttcagagacaggggtctcactatgttgcccaggctggtctcaaactcctgggcttaagtgatcctcctgcctcagcctccagagtagctgggactacaggcatgcaccactgcacttggcataagctctctattttaaagccagtaaccttaatcacacctgcaacgtctcttttgttatgtaatcacatattcacaggttccaaggattggggcaggaacatctttggggacatgattgttctgcctgccacattcctactgggaggatagagacctgagtttcagacccacctctcctttttggtgtgtggactcaggatggggattacttcacctgtctaagccttagtttctacttcttttttttttttttttttttttttgagacagcgtctcactctgtctcccaagtacagtggcacaatcatggctcactgcaacctcacctccccggctcaagcaatcctcccacctcagcctcccaaatagctgggaccacagccacgcaccaccacacccagctaatttttgtattttttgtagagatggggttttgccatgttgcccaggctggtcttcaactgttgggctcaagtaatctgccggcctcggcctccccaggtgctgggattacaggcgtaagcccccgtacccatcagtttcttctgaagaaggggttcacactagcacttaggtcctaggatcatggtgaagagtgattgcattcattcatgctaagagcttatcagttcctggtacacggcattgttatcgttgtgatgacaggggcagggcccacacacctgcaccctcgagggggacggagatgggtcccaaggtctgggatctggtcttcaatttggtaggcccagaaattgaattttctgctcacccagctagtcggtgttagagccatgattcaaaccctggcctcaccagttccaaaaccccctgtacaccaggaggtccagcttccatagactctatccctgctgcctctttcagtggcagttgggctgaggtccctctgagtcacagctggcaggagggaaacccttggattcacagagtgatatgcttagggaattaccctcctttaagccttggggaaggagaactcccccaagtgtataaagcgtgtgcacagaccttgtcacctcttcccttcactgcagccctatgaggtacaaatgaatgattcctatttccaaatgtggttaattgagacccagagaggatgggggagaagacgcaaaatggattaaatacctgcgatattctcttttgtttgtctgtttgtttgagacagtctcactgtgtcacccaggctggagtgcaatggcacaatcttggctcactccaacctccacttcctgggttcaagcaattctcgtgcctcagcctcccaagtagctgggattacaggcatgtgccaccacgcccagctaatttttgtatttttagtagaaacggggtttcaccatgttgttcaggctggtctcgaactcctgacctcaggtgatctgcttgccttggcctcccaaagtgctgggatcacaggcatgagccaccgcacccggccaaatatctgcaatgttttgagcaccgtgcagggcgctttatgtacatcaccttcacgagaccctcctccccaagttactttcctcatttcctagaggagaaaacagctcagagaaggagagaaatatgctcaaagctcaacagctggaaaaagacaggaccaggaaacccttccttttccatcagacgaggtcccctcatgaggagaacgtgcagtccgtgactggggagctcctcagggtcaaggatgctcatctctgaatgcaacccttcccctgcagacctggcagggtctgcaaatagtgacattctttttttttttttttttttttttttgagacagagtctcgctctgtcaccaggctggagtgcaatggcatgatctcagctcactgcaacctctctgtgcctcccaggttcaagcgattctcctgcctcagtctcccgagtagctgggattacaggcgcccgccaccatgcccagctaatttttgtatttttagtagagtcaaggtttcaccatgttggccaggatggtctcgatctcttgacttcgtgatccacctgcctcagcctcccaaagtgctgggattacaggagtgagccaccaagcctggccaaatagtgacattctaaccattgcctatggaataggagacatgcttctatttgttgaaattgtcatccctcatgtaaccagcctggggaagaacattcaagggggcataaccccctccatgggcacaaactgagtcttgggctctggtacaaccagggttctactgaaaacttatcatttcccattagtgttaccatagcaacacgaatgtcttcattcattcccctagtgtatgaacagagctacactcaccccacctgttctcccaagccccctcaaagtcctttcatctctgagattctgtgattcaattaattatcaccaatgcctgcactgctttttgtcgttttcatttattccatctgctgagtcaccgtgtcctgctctagatgagagtggttattcacaacggttattcagccgtcagttgccatggacaccgcacagcctgcttccttcatcacccattaattctcagcaaggctggctgtaagcatgggtaccactgcagttacccaatacccaaggggatcaaactctcccagaaaaggtgggggcccaatgacgcatgaacaggagcaaaatctctgctctcaacagtggaaaagtaaaaaacagcctacggctcattacatctggtcaaaccatgtggaggcagcagtttatcaaataagtcaacaaggtaccattttgttttctggtccatctttggcaaatgctttagtctgtttgctaaccatttgaaggtatattttgatactgaaaagttgttggctgggcatggtggctcacgtctgtaatcccagaactttggcagactaagctgggccgatcatgaggtcaggagttcgagaccagcccgcccaacacgatgaaaccccatctctactaaaaatacaaaaaattagccaggcgtgggggcgtgcgcctgtaatcccagctactagggaggttgaggcagaagaatcgcttgaacccaggaggcggaggttccagtgagccgagatcacaccactgcactcctgcactccagcctggtgacagaactagactttgtctcaaaaaaaaaaaaaagttgttatgcagattactagctccccttgaaagcaaaatgaaggaggcttcaaaggcaggaccctccaggaattggttctgcatagggggtttgcaagtggtggtgcatgggcagctgacctagaagacacggggcagctacaagccaaacccagcccagcacagagggcctaaggagaagaaggcaccaagggtgttccatggtagggggagggtgaaaggacttcagaggtgaccaggatgtgagccactagaaggagagaacagggccatcagcccacaacccattgctcctggtaacacgttatgtttgcagagtccagtggaggggacggggaatcaatacatcaccccacattcacacgcttgccaaacatcagtggatggcgaaatccactttccctgaatctaagcccatcgggttcactccctcacctaccaccacccacaaaggtccctatgtagttcgagagataagtgccaggcctctgacccccaggatatggtgggaagcattgctcctgacccagggagcttggttcctgcccctcaggtacagctggagagctgccgccaccccgctccagcccctcaccatgaaggtcaactcccctatccttcccccacatcctggatgactgactgacactaaatgaaagggcggggcagggtgatgggctgtacctgtgccccaccccattcctctcgcctggactcatatggcagggtaggggcggggtggggggacagttgggagggaccttgagggctttataaggcaggcctggagcatcaagcagagcagagacctgagaggcaccaggcccagccgtggcaccacacacctcccagctctgcaggtgagaaaacccaggaggagaggggagaggctaggaagtgggttgacaggtcctctcccccatcaaggtaccaggccactggccagagtctggggctcaccccttggggtctccagagctgggaccctttctttatcccaggatggaactaggtcttggctccagtacctaccctggtattcccaaccttgccttccacctgcccttctgccgcagccggggccctgcccttagcctatcccttcacactcttcccagccctgggaggtgaggaggactggggttcttctcctttctctcagacaagaaaactgaggcccagaggcaagatgtgacttgcccaaagtcacagggattattaggcaaggctgggataggaatccacagctcctggatcccacttcaagccctttcctagaccagtgccatccaaaagaacgtcctatgatgcaggaaatggtcttcatctgcactgttcaatatggtagccactagccacgtgtgcgcttgaaatggggttagtgtaaggaagtttttgttgttgttgttgtttgtttttttatatagagtctcgccgtgtcacccaggctggagtgcagtgacatgcaacctctgcctcccaggttcaagcaattctcctgactcagcctcccgagtagccgggattacaggcgcctgccacaacacccagctaatttttcatatttttggtagagacagagtttcaccatgttggccaggctggtcacaaactcctgacctcaagtgatccaaccccctcagcctcccaaagtgctgggattacaggcgtgagccactgcacctgaccataattttttaatttaattaatttaaatgtaaagagccacatgtggctggtggctatagcactgaacaacacatgtggttagcatctgacaatacagctccagatcactgatttttcaaacatttcttcagcagcagaattcttttcttccaaagaaaacctaacagaaaacctgattatgaaaaacttaatggccaggcaccgtggctcatgcctgtgatcacaacactttgggaggctgaagcaagcagattgcttgagctcaggagttccagaccagcctgggcaacatagtgagacctcatctctactaaaaataaaaacaaaaaaattagctgggcatagtagtgcacacttgtagtcccaactactcaggaggctgaggtgggaggatctcttgagcccaagaggtcgaggctgcagcgagtcaggatcacgccagccactgcattccagcctgggagacagagcaagattctgtctcacaaaaagaaaagaaaaaaagaaaaacttaaaagcagtacagtattttattaatacaaatgtattctgacaagagaaaatttttatcattttcttatgataaagccaatcagaatagtgagaccaaaagcatacaaaaatagtgagtccagggaatagatgagcatttgaattttatgtttgtttgagattccagtttagttctgtattatgttttccccaaacttgattcaccctgatacataattgctaatggtgacagcttaattttttcttaactgcttcattataatcacaggatattcctcagttaagcaaaaatgacaggagaacctttcctctcagggctgcacaaaaatcagtgtgagctggccaagcattgaatgtgctgcagtctccaaagtgataacatgcggtctgtaacacagctggatgtccatgttcctttggtattactatttaaaagtttcactttttgtttttgtttttttgagacagggtctcactctgtcgcccaggctggagagcagtggtgcaatctcggctcactgcaacctccacctccccggttcaagcgatcctcccacctcggcctcccaagtagctgggaatacaggtgcatgccaccatgcctggctaatttttgtattttttgtagagatggggtttcagtatgttgcccaggctggtctcaaacttgtgggctcaagggatccatcctcctcagcctcccaaagtgctgggattaccatgcctggcctaaaaagttcactttaaataacaagtcttgggctgagcacagtggctcacatctgtaatcgcagcactttgggaggctgaggcgggaggattgcttgagcccaagagttcaagactagcttgggcaacatggtgaaaccctgtttctacaaaaaatacaaaaaaaattagctggacgtggtggtgcaagcctgtagtcccagctcttctggaggctgaggtgggaggatcacctgagcccaggaggtagaggctgcagtgagcagtgattgcactactgcactgcagcctgggcgacagagtgagaccctgtctcaataaataaataaattacattacttaaacagctacagaaccactaacatggcctcaaattctgcagaacagaacctagggaaaccattgccctaggatttgactttctccaatagaagcagtggctgtaatcggggtaggtaaagagaaaaaacacaagacttcggggctggtgtggaactggcagaaactggagaactgatctgaagaaatagtccacaactccacacagaattgcagactcacccgggtgcggtggctcatgcctgtaatcccagcatttgggaggccgaggcgggtggatcacctgaggtcaggagttcgagaccagcctggccaacatggtgaaaccccatctctactaaaaattacaaaaattagccaggcatggtggcacgtgcctatagtcacagatattctggaggctgaggcaggagaatcacttgaacccgggaggcggaggttatagtgagccgagatcccaccactgcactccagcctgggcaacaagagtgaaactctgtctaaaaaaaaaaaaaagaaagaattgcacactcatcagcaggtagaggcctggagccacatggttcagtcccctgcctctgggcctctgtggggacagcctcacccttaagctagtcccttctcccctttgcagacgagatgcagcgactgtgtgtgtatgtgctgatctttgcactggctctggccgccttctctgaagcttcttggaagccccgctcccagcagccagatgcacccttaggtacaggggccaacagggacctggagctaccctggctggagcagcagggcccagcctctcatcatcgaaggcagctgggaccccagggtcccccacacctcgtggcaggtaggagctgctgactgccctgcttgcctcacttggccaggtttggccaaggtctccccagactggctctgacttcagttcctggaaggtaggcatccttcccccattctcgcctctctcacctcctcagacccgtccaagaagcagggaccatggctggaggaagaagaagaagcctatggatggatggacttcggccgccgcagtgctgaggatgagaactaacaatcctagaaccaagcttcagagcctagccacctcccaccccactccagccctgtcccctgaaaaactgatcaaaaataaactagtttccagtggatcaatggactgtgtcagtgttgtagggcagaggagggggactcatctgggggtgaagttgtggcagggagaagagctgagtgcctcttaggggcagggaccctggctgattcttcttgggtcccccagagccccacattgaacgagaatccacaggtatgggcaggataatatatggtagggttcatagccagagtaacctttttttttaatttttattttattttatttttgagatggagtttcgctcttgtctcccaggctggagtgcaataatgagacctcagctcactgcaacctctgcctcctaggttcaagcgattttcctgcctcagcctcccaagtagctgggattacaggtgcccgccaccacacctggctaatttttttgtatttttagtggggacggggtttcaccatgttggccaggctggtcttgaactcctgacctcaggtgatccacccgcctcggcctcccaaagtgctgggattacaggcatgagccaccgtgcccagcctcagagtaagctttttaaaagataaaccgtgtcacactcggttttaacgttgcaatgtttcccagtgcacttagaatacaacctgaactccctgccacagccctgaaagctagccctgaggttctcctcccactgtgcgccaagtggcttccttctctttgtcctctcggtcctttcccttacacagacacgccatgttctctcttgctcagagcctccgaccttgccattccctgtgcctgcaacgctcttccccaggcacaaatatggtgggctcccctttcctccttagctcttgggtgaaatgcctcttcctgagagacctaccctttctgctcctcacccttcacacatagacccagttattctctaccacagggtcaaataaaagagaaaaaattaagctttttaaagaatgaatgctagttgtattcagaagtcttacagaggactatagattgaggcctccagcccaggagcaggctctggcacaatgtttcagcccattgcttatatacatctgggggctaaaggtggaggttccgtatgtgcaaaatcccatcagacttgctcagaattacatgacagcagaatcacagcaagatttgggtcctagatcacagaggcatcatcactaacctcgtcagatgtcatcttggaaatgttctgtgtcagaaaagccagggactaggattatttctcttttaagaaacgtgaagactcaagccgggcgcagtggctcacatctgtaatcccagcactttgggaggccgaggagggtggatcactttaggtcaggtgctcgagaccagcctggccaacaaggtgaaaccccgtctctactaaaaatacaaaatttagccaggcatgtgcctgtagtcctggctactcgggaggctgaggcaggagaattgcttgaacccgggaggcagaggttgcagtgagccaagattgcgccatgacactccagcctgggcaacagaacaagactctctttcaaagaaaaaaaaaaaagaagaagaaaagaaaagtagtgactcagccaagagacatgggagggcctcaggctctctcctgtgctgtcttcaaagcatctttccggagggctgcacgtctgtctctagtcacagagtcaggtgctttgtgaaactgtgccgacaagcagaaaggagcaaacacagcttcttaatgtttgttgctttgtctcacaatagcagaatattttctttagaacacatttcacaatctgtagttgttttgtttgccagtttattgtctgcctctcgggcaaaacaggaaactgggagcgtgacaagtccctcctcccttctgtatccccggtggcaagaataggaggaacccaataaatatttgtaaataattgctcatgagtggctggtgcaggcattgctggtgtctcactccattccatcattgttcttgtgcctgttgacaccattaccttgagctacccgccacctgagggctgtagaggagggaaagtgttttctctacccatcttaggtcctcggctggggctctgttataaaagacagattacaagagaaaagcaaacaagtttattaacatgtgtatcacacatttaacacacagagtacccagagttgagtaactcagagaggtagcttagaattcaggctcacactgtctacggccataccaccctgaacgcgcccgatcttgtctgatcttggaaactaagcacggtggggcctggttagtactcagatgggagaattcaggctcacagagcatcttcaacaaagaacaatacatttgtaggcaagataaaggacagcaatttttagacttccaagggtggctaactgtgtgtgggaaacagctttctgcccgtgggagctgagccctgtcccctctcagggctgggtctggtagccagtgggcctcccccggcttctcctgcccccctgggctgccatgtgacccacatccggcagtcacagctcttgtgccagctgcagaacaagggctggggttcctaccgcctgtcccagaagagggctgaggtccaggcccccaagctccagcctaggttagacttccaagggtggctaactgtgcatgggaaagcagctatatggaaaacgaatggtagataaaggctagtgagtcaagtttgttattagattgcactggtgccactccaggctgaaaggggtctaaagttgtctccgacttgttccagacattatggaaggaaaacgtcctacgtaaatgaaattgtcattctgtgtcctcccaccacagcagcagatgtgtccttccgttgagtgagggtaaccttacgtccaccaaggatacttggagaaagtctatgaggagcaagcttcagtcccacggtttcagactatttatgctctgaacacaagagtactggttaattatgttctcagctctcctcgctgttctaagtgtgcacttgttgcaagtaacttatatttttttatttgaatgtattttatttttttgagacagagtcttgctctgtcacccaggctggattgcagtagtgccatctcagctcactgcaacctccacctcccaggttcaagcgattctcctgcctcagcctctcaagtagctgggattataggcaggcaccaccatgccaggctaatttttgtactttttagtagaggtggggtttcaccatgttgtctaggctggtcctgaactcctgaccccgtgatccacccgcctcagcctcccaaagtgctgggattctctaggtgtgagccgctgcactcagcctgaatgtattttaaagcagtagatagaataacaaaggaatatgaaaaccatggattgaatggaccattttatgtattcagagagacgagccaccatcattgccagaaataccatgtaaaaattggcaatttggccagccgcagtggctcacgtctgtcatcccagcactttgggaagccaaggcaggcggatcacctgaggtcaggagttcgagaccagcctgaccaatacggtgaaacactgtctctactaaaaatacaaaaattagctgggcatggtgttatgcatctgtaatcccagctactcaggaggctgagacaggagaattgcttgagcccaggaggcagaggttgcagtgagctgagatcacgccattgcactccagcctgggagacagggcgagactctgtctcaaaaaaaaaaaaggcaatttggagattgcagtatttagtaaacaaataaatgatcaacattgtgcaaccactaccaaaaagtgtattgtaatgcatcaaaaatcaacattttattcactaatgagtatcaataaaataagtccaaattatggaaaccaaaaaaataataaaaaataaagttgtctccagatatttaactttttttttttttttttgagacagagtctcactctgttgcccaggctggagtgcagtggcacgatcttggctcactacaagctctgcctcccgggttcatgccattctcctgcctcagcgtcccaagtagctgggattacaggcgcccaccaccacgcctggctaattttttgtatttttagtagaggcggggtttcaccgtgttagccaggatggtctcgatctcctgacctcatgatccacccaccttggcctcccaaagtgctgggattacaggcatgagccaccgcgcccagctttatttatttatttatttatttttgacacagagtttcgctgttgttgcccaggctggagtgcaatggggcaatctcggctcactgcaacctccgcctcccaggtgcaagcaattcttttgcctcagcctcccaagtagctgggattacaggcatgtgccaccacacctggctaattttgtattttcagtagagacagggtttctccatgttgctcaggctggtcttgaactcctgacctcaggtgatccacccacctcggcctcccaaagtgttaggattacaggcatgagccaccgtgcccagcccagagatttaacttttatccttcctggtagatggacacagttgaaaatgtatgtcctgtttttatgcaaataggagggtagggagcttttcttgtatctgcttcttctcaattgccttcagctcaaaatagtccttatgccaaagtggcatatttggaggtaacacattctaatttccttcagggccaagtgcagggcagttaaatgcctccagaagcatctctcagacagtgtcagatgacagttagaggataaataccccagctcccccacccaaggggtgggataactctgagatatattcttttttttttttttccttgagacggagtttcactcttattgcccaggctggggtgtaatggtgcaatctcagctcaccgcaacctccacctcctggattcaagcgattctcctgtctcagcctcccgagtagctgggattacaggcatgtgtgccaccatgcccagttaattttgtatctttagtggagacggggtttctccattggtcaggctggtctcgaactcctgacctcaggtgatccacctgcctcgccctcccaatgtgctgggattacaggtgtgagccacctcacccaggctactctgagatatattctactgtcccccagagttcccagcaggactgagacccggttagccacagcaataatcttctcaatgatattcttttggcaggggggccacaaagtgtgttttatttttactattcatataaataattttctataatatcctggagcaaaccagagaatttggcagtcccatttgcgggtcccctcagagacccacaggccagtggcatctgtgtgaggtgcccaggttcacagagcagcttgtggcttgcatccaccttgcaggttgcttttcttccacatcaccactggggacttgaagataacaggggcagggaatcctccagattttaggaaatttcactgcttctcctgctcagtggtctctggtccacaaggtgttctcctgcatctccgtttccttcaaagctttatcaaagctggcaatttcccccatgtctggtttgtctgtcattttcttttctctttttttgagacagggtcttactctgtcacccaggttggagtacagtggtgcaacctcagctcactgcaacctcaaccttccaagctcaagtgatcctctcacctcagcctcccaagtagctgggattacaggggctgccaccatgcccagctaattttttttgtatttttagtagagacggggtttcaccatgttgaccaggctggtctcgaactcctgacctcaagtgatccacccacctcagcctcccaaagtgctgggattacaggcatgagccaccgcgcctggcctcccccagatattttcttgtgttttcaaatggagtctcgctgttgttgcccagactggagtgcagtggcatgatctccgctcactgcaacctctgcctcctgggttcaagtgatcctcctgcctcagcctcccaagtagctgggattacaggcacccaccaccacgcccagctaatttttgtatttttagtggagacggggtttcaccatgttggccaggctggtctcgaactcctgacctcaaatgatccacccacctcggcctcccaaagtgctaggattacaggcatgagccactgcacccagcctcccccaaatattttctatctgtggttagttgactccacggatgcagagcctgaggatacggagggcgactatacttgttcctaaaccctgttccaggtctgctctggggacttcaccctaagacagtgggtgactctctcccatcctatctttcacagccaggccactgagtcagtctctggggtgaaaggatcagggaagcatgagctcaaatcccagctccacactagccatgatctgctggtgagggcatcacttaacctactctggcctgagtttctccatccaacagacacttatgacatcacccaccgccctctaggagctgctgctatgattaaacggcgtatttaataggagtcctcggcacatacttcaatattagcatccaccctttctctacaacttcgccctgccaagtgcacacacacactccctagagagacagctggaggctgggccaggagggtatagatcctttatttcctgcaccacacgcacacaggctgacaagcaataggagattgagaggtgctgtgtgaaggggggcaggtacctgcaggaggcctcagtcccagcccccagctattgaggaacaaaggtgtgggaaagggcagaacatggaagaggaagccaggggcagggagggggggatcaagacagaggggagaggggctgggccacggatgggagcctggacacccccaggccactggcagaagagggagggagggagaggagacacaccactgggcagaggggccctcacccacccacacacagagacacttgtggttacaaacagtaggtagggactgagaagaaaggatgaagaacagggaagacagccaggtccctcaagtcaacaagaaccagggtggctaccattagcatgggcatcaaggggtgaggggcacattgttgggaaggcgctcacaactccctgccggtggaagctgggccctgttccctgctcagggctgagtctggtagccagtgggcctctcccgggcttctcctgccccctgggctgccatgtggcccagacctggcagccacagcttttgcaccagctgcagagcgagggccggggttcctaccgcctgtccctgaagacgttggaaaagcctccaacatgtgggaaagggcagaacatggaagaggaagccaggggcagggaggggtccccaagctccagcccaggttcatgaacacagagggtgggctggtgacagacacagggtcccatttcagaggatgggaaggagggtctgcgggtgtggggcttggccaggcagcagaaggaggggcctcaagctgtctgtggggcctctgcaggctgctggggaacagcaaagcctggaagagaagcaggtggatgtgaactggggcattgatgaccacaggcctggcctgggcggtgggcaggggtctgatcaactgtatcagaaggacacggaaagtcgccattgataattatgcaggttgccccctgcatgcgccataaaggtcatggttcagtttataacctgcacaagcttacatgacacgcctgctgaagccagtgctattccacccggcagtgaccaaagggccatgagaatggggacaggctgggacgggtaccaggacagcactagaggggagggatgggccagtgaaggtgctacagcacaggagtagagaggacgggctcagatctaccccggctgtgtggccccaaacaagtgtccttagctctctgagcctcaccctcctcacctaaccaatggggacacatcacctgccacggaatgaggctgatgggagctgatgcacgtgcaatggctgctgtgcatgagtgtcacaaggtcatctttcatgtcctgcggctccttaaagaggcagggctcacatggcctgcactcggaaggtgcagctcccagactttggggtttctggctggggagaggagaccctgttccaccccacaaccctgcaggaggccctagcccaccttctgacacccaggggactgttccaactgtggcccttgctggtgaaggcctttgtccccatagcctgggcagtcccagaaggcctctcttcctcccaggccgtgggagggtggctggccctgtcctccagcctgggtcagcccccgggctgctccaccatcccacccaccgccccccgtgtttgttttgactgctgctgccactgctgcagagttggagagcctgggggatagaggaggcaggggttgggggcaggggaagcaagcgggcagagatgggaagctgaggcgcagtgtgggggcacagtcccagccctaacccccagcccagcccccaggagaaaagtggatggagatctggaatcctaagcaaatgccacataaatgagcactgacactacggttcccactgaaggggatcagaggtgtctatgcaaatgatatgcaaagtccatgcaaataagcacagcaggtagagccaggctggggcaggtgagcactcggggagcttatccaccctctcttttcatcggcacgacgatctgcagcttgtccggctggcggcagggagggccccgtgggggcactcacctttctggagcatcttccacctcagctgccgcctgtaatgggcatcttgccagttggccagctgctggaggacataattcatgtccaggtgtgaagggcccaagccgctggcctccagggctgatgtcaccacgttcatccgcgttgcctcatccagctccagttccacctcctcccagccctcggtctcctctgacaccagctctgcctcttccatcaccccttcctcagccggcaccttcttggcagcccccagctcctcctggggcacgaactcctccgcaggcgtgaaatcttccccccgcatgatatccgctgccagcatcaacccttcctcagcctcaaacccccgcacctgctctcgatcctcactgtagcgaaaatcatacctgggcgggagatagcgacatcttttgaggggctggaaagtccaaccccccaggcccacccccacccgtctccacacagatcctgatggttcctcctggttctgtcccagccaggggagaggggagctaggtaccagctccaaggcttcaaatacccagcccatccccctggtgggagggaggaagaatggtcaccaacactgcataggccccatcttcttttatgtccctgaccctgcacggaatacaccaacagggttaacacccacttctgcctccctcctgcatgatttaaccttcatagcccaccccacagctacttgccataggaacaaatccattctagacaggctcagacaggtcaaatgacttgcccaaggacacacagtcaggaaagggaccacgctgggccttagtcccaggtgttcccagctcctaagccagtgcctgtcacctctcagcccatagtcagttgaaaagaaagcttcagtccccactcagagctgcctggaatcagacggccacccagggggcaagatttgaaggaaaagtggggcagctccttcccagaacagttctcagttcagccagccgagatagcagggccttctccggagttgcagggtggcagaaccagaggcaggtgggctgtctggctgctgaaagctgagggcaggttgtaggggagcccctggcaggcttaccttaggctggatgtgtcccctctgggcatctcataattccttcaaagagaaaaggaccttcattatgagacaatggaagccgaaactgcagtccctggggcttggtcaagctgaagaaccttaggtagtggccatgagcagtggctcacgcctgtaatcccagcactttgggaggccgaggtgggcaggtcacctgaggtcaggagttcaagaccagcctagccaacatggtaaaaccccgtctctactaaaactacaaaaattagctgggcttggccaggtgcagtggctcacgcctataatcccaacactttgagaggcccaggcgggtggatcacaaggtcaggagttcaagactagcctggccaacatctctactggcccatctctactaaaaatacaaaaattagccgggcgtggtgatggccacctgtagtcccagctactcaggaggctgaggtaggagaatcgcttgaacccaggaggcggaggttgcagtaagccgagatcacgccaacctggacaacaaaacaagactccatctcaaaaaacaaaaaaaaaattagccaggctcgtgcctgtagtcccaactacttggaaggctgaggcaggagactcgcttgaacccaggagatggaggttgcagtgagccaagatctcgccactgcactccagtccaggtgacagagtgagactcgtctcaaaaaaaaaaaaaaacctcaggctgggcatgatggctcacgcctgtaatcccagcactttgggaggctgaggcgggcagatcacctgaggtcaggagcttgagaccagcctggccaacagggtgaaactgtgtctctactaaaaatacaaaaagtagccgggcgtgatggcacatgcctgtaatcccagctactcggaaggctgaagcaggagaattgcttgaacctgggaggcagaggttgcagtgagccaagatcataccattgcactccagcttgggtgacagagcaagactccatctcaaaaaaaaaaaaaatacctcagggggaagtgatgggtccatattcatagagaagcaatgagtggaggggctgatgcagtgaacgaggcgggtatagggaagcgtggaaggtcagagtgtgagggcaaaccccctccccactacaggaaaggccatggcctatggggcaagggagggccccagccacgcacctctccataaaatacacagggtctgagatcatcctccttagagacgttctgagctcctcagccagcgtctcctggaaaccaggaagagtctcctatggtggagagaacagacgttaccagaggacccccacagaacccccacccataggctcaggcacagaagggaactgggatctcaatcagccaccaaggctgagacacaggcacagacgtaggaaagtgggcagccaggggagggtcctcaccagaggcacgctgtatgggtaatgggtggcagacccagtggacactgggggttgctggcggagggtcttcacctcctcctgcatctcaatcagcatgcccccacaatccatgtacttctcccgcaggtcctgcagctgggaacccacccacacgctctgctgggacccaggcacacccagtccagcactcctgcctatctgctctcaggctgaggccagaggcccaggttctggactccaagtgtcatgtgggggacccagggcaggtccctgcactccacaccactcagaccttgatggaactgtcacctgctgggctgtgccaggcatggagggggtggaaacggacaagactcagttcctgctagtcctctccagagtcaggtagctgccaagggcctggggtccccactctgggccagcggctctccagggtgggggcagaagccggcagcgagactcacctcttcctggagctgcatctggatttccttctccgaagccagctgcttctgcaacttttcagtctcagccccatactggaaggacccaaaaccagtgaacccccatctgaggcctacccactcagggcaccccctgcttccagcaagtcttcccaggcacatcagtgagtccttggcagcccatgaaatgacaagtcacacggaaggagggcaaagaaggcaggggagtcacgcagcctggttcctagaagactccaggaccctctctgggccttggtctcctcaagataacaaggggtcaagataaggggctctctgaggtctctgactctgacacagaaagggacctcaggcctggtggagccgagtggaggcaggaagaaggaagctagggtcccatggggccacgacaagagggttccacacacacccgactcaccatccggcagcgctgctgcagcttcagcacctgggcctgcagccgagcgacctcctgctgctgccgttcatagttttccagcctgagcaccagcacctccgacagctcagccatctgttggctggcctccgctggggagggcagaggacaggtcagccctggctcccctggccttcagggaccagctctggccctcccagatgcctctgtctcccccaccctcggctgctgcgctgtgccagtgggtcctgcagggctttgcattcctcactcaggtcttccattcaagaaatgttcattgactgatactgagcagggcaccagggtgagtggtcagtaagacccagccgccacactgaggtaaagttggtggggagacagaccacagtcacacatcatacaggccatgatgggcaaatgtcaagggtgtacagggcaggggcatcacagctacagcacccaacccgacctgcaaggtaaggaaggattcctggaaaaaggaaccactaagctaagaccacagggcaagtgaagctcacccaggcaaagaaggaaaaacatgggtccaagctgactggaaaggcccagaggccatcataagacactgggacggggagggcccagaacagtgcacacaggccagaccacagtagtgggcaagggggtggggtttatcctttggccaatggaaagctatttgggagttttaggcacagtaatgacgtggtcagacttgggtttgttggtttatttatttatttatttgagaccgaatctctgtcgtccaggcaggagtgcaatagtgcaatcttggctcactgtaactgccgcccgagtccaagcgattttcctgcctcagcctcccgagtacttgggattacaggcatgcgccaccacgcccagttaatttttgtatttttagtagagacggggtttcaccatgttggccaggctggtctcaaactcctgacctcaagagatccacctgcctctgcctcccaaagtgctgggattacaggggtgagccactgcacccggctacttgttttttaagaaatgaggtcttgggacaggcacagtggctcatgcctgtaatctcagcgctttgggaggctgagggggatggatcgcttgaggtcaggatttcaacaccagcttgcccaacatggtgaaaccccatctctactaaaaataccaaaattagctgtgcatggtggcgcatgcctgtaatcccagctactcgggaggctgaggcaggagaatcgcttaaactcgggaggtggaggttgcagtgagcaaagaccacaccactgcactccagcctgggttacagagggagcctccttctcaaaaaaaaaaaaaaaaaaaaaaaaaaaaaaggaaatgcggtcttggccgggcgtggtggctcacacctgtaatcctagcactgcgggaggccaaggcgggaggatcacttgaggtcaggaattcaagaccaacctggccaacatggtgaaaccccatctctactaaaaatacaaaaattagctgggcacggtagcacaggcctgtaatcccagctactcaggaggctgaggcaggagaatcacttgaacctgggaggcggaggttgcagtgagctgagatcatgacattgctctagctgggcgacagtgagactccgtcaaaaaaaaaaaaaaaaaaaaatttgccaggcgtgatggcacacaccagtagtcccagctactcaggaagctgaggcaggagaatcacttgaacccaggaggcaggggttgcagtgagccaagactgcaacactgtactccatctcaaaaaaaaaaagaaagaaagagagagagagagagagagagaaggaagaaaagaaagaaaagaaagaaaagaaaagaaaagaaaagaaaagaaaagaaaagaaagaaagaaagaaaaaatgaggtcttgccaggttcccaggctggggctggagtacagtggctattcataggtgcgatcctattactgatcagcatgggagttttgacctgctctgtttctgacctgagccagttcacccctcctcaggcaacccagtggtactccactccctggaccatactgaccctgtcggcatagtgtactacagcccagaattcacaggctcaagcaatcctcccacctcagcctcctgagtagctgggaccacaggtgggagcccctgcacctggccaggtttggttttagaaaactcattaaggctgtgtgcagaagttcctggtagggcgcgagtagaggcagtgcgaccagttaagaggtatcttgggctagaggcagcccgagtggggagggggaaaaagacttaagccattcctaggaggtaaaagcaacagagcttggggactggttcctactccagtagcctggggaccagtggggccattcagggagttgcagaacccagcaggaaggaaggtcagttctggggtaaagggaacagcaggagttcagctgttgccactttgcgtttgcatctcaccagctacacttgaactcctcaggcacaaacactgctcctcactcatcttcataaacacacagtgcctaggacgatgccaggcacagccactgccccgtgcatgactctgaactgtcccagccctgggtgcctggtctctggcagctcatggctccctcttgcctgccccaaataagagaagacaggcttggaggagacccacctttttttttttttgagatggagtcttgctctgtcgcccaggctggggtgcagtggcgtgatctaggctcactgcaaactctgtctcccaggttcaagcaattctcccacctcagcctcccaaggagctgggactacaggcttgtgccactgcatctggctaatttttgtatttttagtagagatagggtttctctaagttggttaggctggtctcaaactcctgacctcaggtgatccgccggcctcagcctcccaaactgttgggattacaggcatgagccaccgtgcctggcctgagacccacaatttctgtatagctctttatagtttgcacaaagtacttcctcagctgttgacactcttaatcttcataaaccctggagagatcagtggggctgagaaaattaatccccattctaaagacaaaggttcagagaggtcaaggaatgtatccaagttcacacagctaggagtgccagatctgggacttgaacttggatctccatactccacatcttgagttcttttctctgctccttgggacaaccccccaccccgagtgacaacattacgtacaaaactgctccacacactccagaatgagcatctgttcctcatcctcaagagtgtcgagttgagaggcctggagggagacaaagaggaagggacagggaagtcaacaccccctgctagcagggacgccctcctcccccattctcacctcttctctcagctgatgattctcctcctccagcagcctcagcttctcctgcaaggcttccagctgtgggcagtggtgctggtgcagcaatgcctcctgcgaaatcctaggggagggaggaatgggagtcagggtgcagggagtggggcttcccagttcccagcccaccagggctaagggcagtgttctcaattagttccagcaaccctgccagcaagcacatcacctgtgtccctcttaacaaatgaggaaattgaggctcagagaaaggacttgcaggtgcaaaggcaggaactcacagcttaggggcatcacagggatgagcacactgcaggtcttcctctgcttcttcttcttcctgttcctcttctgcctccttttcttcctcctcctcttcttcatcctcatcctcctcatcagaatctgagtagagctggaggagctcatcccgcaagttcacctggtgtctgaggtataaaatctggcaggaagagagaggagccatgggttgggagtgggcagggacaggagagggtcctggcatgaggcaggtgtagattggcccgctatcctctcctccccacccggttacctcctccttggctgagcccagcagggcttccagcttgctgttctcctccatcaaaacactgttctgtttcaccagggactggccgatgcgagctgcagtgttcaggtccctctctctctgcaggaccatcccataggtaacgctctcccagacaggtgggagaagctgggggggacacaggggtcagagagaggctaggcccctaagagaaccttccccatcccctagttctctagggtaccagaccagagtctgccattaacccactgtggaacctggctcagtttcccctcatggaaaaagaagatcagaccagattggctctgagagctcttccagcctgaacatcccacatcgacctgtcttccataagaaggaccctaacctggggccccagagagactgccaatcaggaaataaacaagacccccacccctacaggacaaaactagaataagggcttgcctggatcaggaaggcagtacacacctcctccagcaaatataacatcactttgacgtcttcctgggtgatctttttgactggcggaggtaggttaggacacagtgctgcaggaggcggcaggtggggagaaaaggcccagccaggtcaggaaaaaggagcagatgctaccagcaaacagctgtttcccgtcctatcgtcagttctccaacaagggtcatcgggagagaagactgggctcccctcctgccccccacatcctccccttacccctcggcactcaacactcccttccctgctcccagggccaagtggacagggtttttaggtttttgggttttttttggttttttttttttttggtttttttttttttttagacaaagccttgctcttgtcctccaggctggagtgcgatggcgagatctcagctcactgcaacgtctgcctcccagattcaagcaattctcctgcctcaacctcccgagtagctggggttatacacgcccgccaccacgcccagcttatttttgtatttttagtagagacggggtttcaccatgttggccaggctggtctcgaactcctgacctagtgatccgcccgcctcggcctgccaaagtgctggctgggattacaggcgtcagccaccgcgcccggcttttttttttttttttttttttttacccctggaggagcctgaggtaagggggtcacagtcctccaggctcagaaactgggctctccggacacctgggtccctggcgcctagaatggagacagccaggggaagtacagcctcagactggctcatcaccccctacccaggaggcagtgcaatggagtctcctgggtcatacaaacagacgcagccactcaccctgcacctgttgcgtgtgcagaggacaggaggaagacttcaccagattaggagacactcgagcctctaggcccaatccagagatctcccccgacccgcaggaggataggagagacaaggggcaggaaaagagcgcgactttgcccccatacccgcaaccaaaaagtgggcaaaacttccccctccgcccgcccacccacccctccatcgcacgcaagcccggtcggccagcgcagactcagagcgcgcgggacagcgccctcccgcagccccccgcccctctcctggcactgcggtagacccaggagaggggcgctgaaggggtgcagatctgccgcagcaagaggcgcgtggaggtgggtgggcgagcgtgcaggccccagaacctgactcacgggcacaaaccaggggacaagagcagaggaggagatggagaaggggcgaccagacagacaccgcagtgacatcgcgggggtggtggacgggtgacactgagtgctagagggggcggggtgcctggacccgatggggccacttcctccctggagttgccccagtccccacccggtccaggaccccgggggcccgatttaccttcctccagctcccgaataaaggcggcgcgctcagggccggacaccccgggtcgccggccaacgtaggcggctggcgtcttccagatgcccgctgcctttccagtcccccggccagtggcccgggaaccaaacggcccttggaatacgaagcgggtccacggcgcgtccgaattgtcgggcatagaccggacatccccttggatggccgagaatgcggacgggcgccgggctcctgccttggctccagcctccgaggccgggcgagctccggtgcgggcttccgagaggaactgggatccagaggtggctcgggatcctactctctgtccagtgccccgtgcctgcggctgcgcagagggctccggagcgggactggctgagggcgaaggtgcacaggtgagtgctgctgggtccccgggtccgagccggctccccgcgcagcaccggcccaacctcttcgggcgcatctcgagtctgccgtccgctgctgcggcgggacctttataacctgcgccagccgccgggccggaccacgcgtaggggtgggggctgccgagaagcaactagtggcaagcgggactcagagccgcgcgggaggggagctagtggtgacggaacagagcacagtaagaaaagcagggcaagaagggcgagtgcaagttccggatggctccgagttgggatgggagcgaaagattttttctgccctctccatctccggagaatggttctgcccaaagccgcggctgccccagcactcgcgggtccctggctgggggcagcccctccccagctgccgcgccggggtttcgggtgccttccctggtgtagaagctgccaacccaacgttgtgcatacggtctggggtggccagtgcattagggcagcgctgcgtctttcccggttgactgggagagacattccaaactccagtgcgcttccaacgtgctgcaaccctgcctggcgctgcaaccctgcctggcgctgcaaccctgcctggcgctgcaaccctgcctggcgctgcaaccctgaccctcgcgctcacaccccagtgctcgcgccactcgacgtcttccatttgattggattaactgttcttcacctccaaccctagttcgctttgccctcctcttgccatgctggcgaacccctgttctccttgggagacgcctcttaaaagtctccctgtagccgggcgcagtggctcacgcctgtaatcccagcactttgggaggccggggcaggcgaatcacctgaggtcaggagttccagacaagcctggccacctggtgaaaccctgtctctactaaaaatacaaaaattagccaagcatggtggcgtgtgcctgtagtcccagctactcaagaggctgaggcaggagaattgcttgaacctggaaggtagaggttgcagtgaaccgaaattgtgccaatgcactccagctggggctacagagcgagcctacccctcaaaataaataaataaatagaatactttttttttaagtatcctactggaaatgttgggtagacaattagatgtataaatctgaatgtaggggagagaccgggctggagatttaaatgtaggagtcattgttctttgatgaccatttaaagctatgagactggtgagatccccaagagactgagagaagacaggtaagagcgcccaggactaaccccctaggattcagagggcagaaagaagaagaggaggcatcaaaggaagactgggatgagtggggcagtgaagtagaggaaaaccaggaaagttgggtcctagaaagtaaagaaaatgtttcatgtagagagtggccacctgtgttgggtggtgctgttgggccaggcaaagactgaggacagagactcagcttggcaaactggggtcatgggcaaccttggtgagctggggtcatggcctcggcaagagcggtcttgcggggccaggcacagtggctcacacctgtaatcctagcactctgggaagccaaggcaggtggatcacctgaggtcaggagtttgagaccaacccagccaacatagtgaaaccccatctctactaaaatacaaaaattagctcggtgtggtggaacaagcctgtaagcccagctacttggaaggctgaggcaggggaattgcttgaacccaggaggcagaagtttcagtgagccgagattgcaccactgcactccagcctgggcaacagagcaagacttgtctcaaaaaaaaaaaaaaaaaaaaaaagagcggtcttggtagagggggtgagagagaccaaagaggagtgaggaaataacgagaggtaacaaaatgaaaacagaaagaaggctaggcgctgtggctcacacctataatcccagcactttgggaggcttaggagggtgaattgcttgagcccaggaatttgaggccaacctgggcaacatggcaaaaccctttcgctacaaaaaaatacaagaattggccgggcgcagtgactcacacctgtaatcccagcactttgggaagcctaggcgggtggatcgcctgaggtcaggattttgataccagcctggccaacatagtgaaaccccgtctctactaaaaatacaaaaaattagttgagcatggtgacgggtgcctgtaatcccaggtactcaggagaatcgcttgaacccgggaggcggaggttgcagtgagccgagattgcgccattgcactccaacctgggcaacaagagcgaaactccgtctcaaaaaaaaaaacatagctgggcatggtggtgcatacctgtactacttcaggggctgaggtgggaggatcacctgagcacaggtcgaggctgcactccagcctgggtgacagagcaagaccctgtcggaaggaaggaaggaaggcgggagggagggagggagggaggaaggaaggaaggaaggaaggaaggaaggaaggaaggaaggaagggagacagtatagaaaactgtattgaagaaatctgcaacaaaggagagctggaaaagggcacaggagctgaaggaggacatgagtgctggggagtgtgttttgaagatgggagagaggacaatatgtttacatgctgatggaaatgttccctcagggaggagaaaacaggtgcagaaaagagagcttatctcccagaatacttctggaaatggaggaactttcataacataaccgttctcctccttgttcaaagtctgcatgttttattttctttctttctttctttcttttttttttctttttttgagacggagtttcgctcttgttgccccaggctggagtgcaatggcacgatctcggctcaccacatcctccacctcccgtgttcaagcaattctcctgcctctgcctcagcctccccaataacatgcgtcaccacatccggctacttttgtctttttagtagagacggggtttctccatgttggttaggctggtctcgaactcccgacctcacgtgatccgcctcccccttggtctcccaaagtgctgggattacaggcgtgagccactgtgcccagcccaaagtctgcatgtttcctatggtttctttgtcagcagaaagcttgaaggagacacacaaccccagggtttgctacgacagtgaggttgaagaacataaggaggtggctgttcgggcatcggcacagcccaggcttccgtgaggctacagctccataggctctgccgagtggtcctcccacagcccagcttcctggactgtctctctgtgccttggacatctctgcagccccaaccaccaagcacagaacagggcatacagaagaagcctattacactcctgctgaattaaattgtttctggccccatgaggaagaagccctgggaaacccctggagagtttgacggggaagaaggcagaggcagtgggatggagaagacagagatgaagttaggagaccctgaaagctcccccagctgaccacaccctctaggtcagcgcactggcagccagcaactctggctacggccaccagagggcagtgtcagcccgtatacctccccacgtggcttcctcacctacaggctcagtcgccccacagaaagtggagtagggacagagactccattttacaaatggagaaaccagggctcagggcccgtcattctggaagtaagcattttggcctggctgacagatatctgcctttcgacagcctagggctgtccaggagactgggggtagtctctgatccaggcctctcaagtggttttcctctgtcaaccaccccctccctctcctgcttctcatctagggggagaaatcagacacagcaaagacccttggcctcctgtcctccctcccagtgtgcatccatggaccctcctggatccgaaagaggatgggagggtgcagaagacttgccaggctgcaaagccagaccacccaccacctaattgtgcacaccccctgaacctggggcacattcactccagtgcccagccctgggcagcacacaggtggctcaggcccctcctcctgccccctcccctggcctgaccctgggaaaaaaaacacctggaacagggtaggtaatagaaagagcccctaagggtcggtgccagggacctgggggggacaggcaccggggttactttctgcaggggagcagggtggaggggcaccctgaactaggaacaggggagacctcctcacccccgccgcagtcctgctgtctcctgcaggcctttcgggggccctcccccatctctgatccaggccttcccctccagaaccaggcagtggccgccatagccctcacccccaccccagaacccaggtacagtccctccttacatcagcagagaatgggggacttgagggcctaggccctcagaggttcccctttaacttttctttttgtttttttgagagggagtctcactctgtcgcccaggctggagatcagtggcatgatctcagctcactgcagcctccgcctcctgggttcaagcaattctcctgccttagcctcccgagtagctgggactacaggcacatgccaccatacccatctaatttttgtatttttagtagagacggggtttcaccattttgcccaggttggtcttgaactccggacctcaagtgatccatctagcctcggcctcccaaagtgctgggattataggcatgagccaccacacctggctccctttaacttttctcctcttcttaaagagcccagcccaactcctgggccactgagcccctctggcctggaacaaggaggtaacgaggtgctgggggcagctgggggtctgagccctctgcctgctgtcttccatggccccgctgctggccaggaccgaaagggagagaggcaaggagagaaaggacagagagcaagtgccggggacgagggcaaggggctgaggtggctgggacctcaggtggagagtactgacccccactctgaagttcttccccacctgggggctcctatcctggaggaaggccccgcctcccacacaggctcactcctgctcttggttctgatgtctgactcctcctctgagaagccctccctggtggggctcacctgtgttaggtatcctgtgccagatcaggcctctctgtgtcctcccctcccctggcattctctcccgactctgtccgctcacagggtaagatgatgtcattgacaagatgatctatttagtaacaatgagagcagtatctgttttgctcacttttgtattctcaggactctaatgaggcatccaataaatatttgttgaatgaacacatcagtggattctctgggtatggatggtgggagtggtaatcgccctggggaagtgacttccggtaagggtgagatcctaggactctggactcccaaaccagggctccacatcccctggcacaggtgagcgccaccaggaaccctccaggggcacctgtgggagaggatggagaccggccaggatgtgagccacagatccccagggagtgagccttggcacagccaggtgcccacttcttccctagagccctcagcccagccccgctcctttccccagggaccagagcaggaggcctgggctggcctgatatggagctgggtccagcaggtcggcagtgccctgacctgggaagctccacgggaagcagctgggagtggggggaccacagcaccctctgtgaggagggcaggaccgtcagctgcgtccagcctgctggacaggcaataccaggtggtggcgagcctagaaggatgttctggccctttggcctccctgagctacctccaggctcagggataacaccaaggagcccttcgctccctgacctctgtccccagagtcagcaattccctctcatccctgcgtccatgtccaggctctgagcccttccagggacaatttgtgggattggggatagagacagaggaataaatacacattcactgagacctgactaggtgccgtatggattttggatatatttcattttatcatcactggaaggaaaaaaatactgctgtgttatagatgaaaaacagaagcccagagaggtcaagcaacttatccaaggccacacagccaggaagtatcagggagggaagatcacaaaggcttgtcttaccaacagcccatgtgctgtccacggcctcccagttcagagaagaagctgggcgaccctccctctcccgtacccaggggtgcctgtgctcactgggtttgcttccacataatactacttatgagccaactgttaggtcttataaattagatgcccaccgtgggcatctgccccatggcctctggaggaatcctgccagaggatggagataaaggaaggacaaataccaagtgccttttgcagacgctatgtccgctcttccttcttcaagcctcagctcagacgccacccagtcttgggagcctcccctgatctaacctggctggatctgggtccctgcctcccagatccaatgtgcttccctctacctcagccttccacacactggggcaaaagcaagaagggcttctgtgcccagcttttagtatctgagcctgccttggcccatgcttgatgggctcagagggaaacacttgtactctgacataaatccgaaataacagaatcatcctgactggttccagtcttcaaaataagaaagactgagttttcaccataaacctggactcctggccgggcgcggtggctcacacctgtaatccagcactttgggaggccaaggcaggcagattgcttgagcccaggcgtttgagaccggcctaggcaacatggtgaaaccctgtctctacaaaaatacataaattagatggacatgattgtgcacgcctgtagtcccagctacttgcgggggctgaggcaggaggattgcttgagcccaggaggtcaaggctgcagttagccgtcttcccgccactgcactccagcctggatgacagagcaagaccttgtcataaataaataaacaaagaaacaaacaaataaatctgaactccctaacaaaaaataagcctattcctaaagctaagtcatgacctttgtgataaggtagtgaaatcgttgtggttcccatggcagaacggataatgtcaggctttcctttacatccttgccgtgttttgtatctgccccgccaggccttctgaaaaggaaccccctttactcctcataagtaaacgttcctctcctctatgtgtctgtctctttctttgacctgggctataaacactgatttctcacctgtgggccccactcaaggcaggggttggcagtcttcatctgtgcattccagagcctggtgcaggctagcaagcttgagcgctcgataaatacttaccggataacttagcaaactaggagagcaggcaacaccctgaccccaggcgcttcctcaaggcccagctctccccaaaccctcctccaggaagcccagagcatccttcaccttctccaaccacatcacgcccattgggctacaggagggccttgggctgcctcgcaggtggtcattgacactctcccgtgtgtagaggtctcagcttgaccaaaagctacagcatcaagaacacagacagctcctcacatgcttgtggtcaccccacctgggcacctcatacctagcaggggctccagcaacgtgcgctgattccttagtctggagggcaggctgtcatggtgtaggtggggcaaagtggcaccagggatgccctcagggcctggctgggcccttcactgctacaagtggtctccaaagtggaagatgttcactgctgtcctgacctctcaacctctcagctctcactcaacagtagacatcacagagagtctttgcagaggtttttttcttcttttttttttagatggagcctcactctatcgcccaggctggggtgcaatggcatgatctctgctcactgcaacctccgcctcccgggtgcaagtgattctcctgcctcagcctcccgagtagctgggattacgggcacacaccaccacgcccagctaattttttgtatttttagtagagacggggtttctttctttctttttttttttttcttttgagacagagtcttgctctgtcacccaggctggagtgcagtggcgtgatcttggctcactgcaagctctgcctcccaggttcatgccattctcttgcctcagtctcctgagtagctgggactacaggcgcccgccaccacacctggctaatttttttgtatgttttagtagagacgggatttcaccatgttagccaggatggtctcaatctcctgacctggtgatccacgcgccttggcctcccaaagtgctgggattacaggcgtgagccaccatgcccggcgtagagacggggtttcatcatgttgaccaggctggtctcgaactcctgacctcaagtgatccgcccacctcggcctcccaaagcgctgggattacaggcgtaagccaccttgccggccccttggcagaaatttttttttctttttttttctttttttgagacggagtttcgcttttgttgcccaaacgggagtgcgatggcacgatctcagctcactgcaacctctgtctcctgggttcaagcgcttctcctgcctcagcctcctgagtagctgggattacaggtgcgcgccatcacgaccagctaattttttgtatttttagtagaaatggatttcaccatgttaaccaggctggtctcaaactcctgacctcaagtgatctgcccgcctcggcctcccaaagtgctgggattacagtaggcatgagccaccgcgcctggccagagatttttataagacctccctggctttcagtttccctcatctgtaaaatggggataacgaatcataagtcctgcttagtaaagacttcctattaagtgggataaggaaagtaaggcacttagcagccacatagtacgtgcttagcaaaagcttcccctttgactccccagctggctcttggaggggaaaggaatcctcacccccttctctccacagtggagggcagagtgggcaaagccaggcagaggtagggcagggccaagcaggcagagcctagaggtcccttccattccagggcatcagagtgccatggcagacctaggaacagacaggcaggaggagccaggacaggttgtgatggggatcaggcattctccactaccctccaatcctcagctccctgaggaccacctggagttgggcctaacaggaagcccagggacacacctgggctcaaagtccacctgccccctgccctgtagctttaaatccagcaggcagctctgtcctgctgcagtcggtttctccacatgtgaaatggggataagaccgcctatatcacagggttcattcgagaacaaatgagaccacacacaccaagttgcactccaagagctccctcaacagtggtggctgttggccaggtgcagtggctcacacctggaatcccagcactttgggaggctgaggcaggaggatcgcttgaagccaggagttcaagaccagcctgggcaacataatgagatcctgtctctattaaaaaaaactttttttttttttgaatcagagtctctctctgtcgccaggctggagtgcagtagcgcgttcttggctcattgcaatgcaacctcctcctcccaggttcaagcaattctcctgcctcagcctcccgagtagctgggactgcaggtgcacaccaccgcgcccagctaatttttgtatttttagtagaggcaggatttcaccatgttggctaggatggtctcaatctcttgacctcgtgatcagcctgccttggcctcccaaagtgctgggattacaggcgtgagccactgcgcccagcctttttttttttttttttttttttgagacagagtttcactctgtcacctaggctagagtgcagtggcacaatctcagctcgtggtaacctccacctccgggttccggcaattccctgcctcagcctcccgagtagctggaattacaggcacatgccaccatgcccggctaatttttgcatttttagtagagatggagtttcaccatgttgaccaggctggtctcaaattcctgacctcaggtggtccacctgcttcagcctcccaaagtgctaggattacaggcatgagccaccgcgcccagcctaattttttttttcttttttgagagagagtctcgctctgtggcccaggctggagtgaagcggcgcaatctccactcactgcaacctccgcctcccaggttcaagcaattctacctcagcctccggagtagctgggactacaggcatgcatcaccacgcccggctaatttttgtatttttagtagaggtggggtttcgccatgttggccaggatggtctccatctcctgatgttgtgatccgcccgcctcggcctcccaaagtgctgggattacaggcgtgagccaccgcccccagcctaatttttgtatttttagtacagatggaattttgccatgttggccaggctagtcttgaacttctgacctcaggtgatgcgcctgcctcggcctcccaaagtgttgggattacaggcatgcgctatcacgcccggccctgcttcttgtataattgaccttcatattgcacagctggcagggctgtggcacttgagattatgcagtaaagcacccaatgagggctcaacaaatggtaacagttattgttaatatgattattaaaaacaatagagttggccaggtgcagtggctcatgcctgtaatcccagcactttgggacaccaaagcaggtagatagcttgaacccaggagttcgagaccagcctggccaacatagcaaaatcccatctttacaaacaaaaaaacccacaaaaattagccaggcgtggtggcgcatgcctgtagtcccagctagtcaggaggctgaggtgggaggaacacttgagcccaggaggcagaggttgcagtgagccgtgatttcggcacgccagcctgggtgacagagtgagaccctgtctcacaaaataaaagtcggggttgggggctgggggcagtggcttacgtctaatcccagcacttgggagtcagaagcagatggattgcctgagtccaggagcttgaaaccaggctcgacaacatagaaagacccccatctctatttaaaaaaaaaaaaaaaagaaaagaaagaaagaagaagccaatagggtcactaggcatgtcactcacacttctttggcctccaaagtgaaatgaaaggagaaacatttccaacctcaaggttgttagaaggaaggtacttacttagcacagggcccagcacaaagaaagctcagtctatgatgggcatgatcagtaagtgtcaccagtccctggctctccaagaatgacccaggacagaacctcaccttccaggacaggtgacagctaccttgcagttaaaaccaatcaggggaatcaggggttcccacccccatcttcttttttttgagacagagtctagctctcgttgcccaggctggagtgcaatggcgcgacgtcgcttcaccgcaacctcctcctcccaggttcaagtgattctcctgcctcagcctcccgagtagctaggatgacaggtatgtgccaccacgcctggctaattttgtatttttagtagagacggggtttcaccacgttggtcaggctggtctcaaacctctgacctcaggtgatcagcccaccttgatctcccaaagtgctgggattacaggcatcagccactgtgcccggcctcccactcccatcttctgcagaaccaaattcacagaccttggtctgacagacaaaggcccccccatctgacttttgctttactttccagccttgtttctggctgtcttaccggttcctctcccaggctggtcacatcaacccactgtcacttctcacaccctcccactaggtaggtcagatctccatgtcttcagtgctccagctgccaggaatgccaatgccttccctggggcccagcaaacacctcctcctcaaatctcactcactccttcttcctttatcagaatgaccctcttgcctccagttcccagactctcaagcgcatcgctctctcccacacttttctgtggattctcattggaagacaagaaggttgggcatctctattcccaggaccttgaaccaaggctggcaaagagcagcccttgggacacatttagtgaaagaatgaatgaatgaccaatgaatgtagccaatgcagtgcccattgctttccttgggagatattatacttctcttttattattattattattattattattttgagacagttttgctcctgttgcccaggctggagtgcaatggcgcgatctcggctcaccacaacctccgcctcccgggttcaagcgattctcctgcctcagcctcctgagtagctgggactacaggcatgcgccaccacacccagcgaattttgtatttttaatagagatggggtttctccatgttggtcaggctggtcttaaactcctgacctcaggtgatccacctgcctcggcctcccaaagtgctggtattacaggcatgagcctgtatgggaggctgggatgggagacattatacttctatcaatatgaagtaagtgccatggttaattttatgtgtcaacttgactggcacggggtgcccagattaaacattatttctggccaggggcagtggctcacgcctgtaatcctaacactttgggagactgaggagggcagatcacttgaggagtttgagaccagcctggccaacatggtgaaaccctgtttctttattttttgagacggagtcatgctctgtcgcccaggctggagtgcagtggcgcgatctccgctcactgcaagctccgcctcccgggttcacactattctcctgcctcagcctcccgagtagctgggactacaggcacctgccaccatgcccggctaattttttgtatttttagtagagacagggtttcaccgtgttagccaggattgtcttgatctcctaatctcatgatctgcccgcctcagcctcccaaagtgctgtgattacaggtgtgagctactgcaaccggctgaaaccctgtttctactaaaaatataaaaattagccaggcatgttaccatgcacctgtaattccagctactcaggagactaaggcatgagaatcacttgaaaccaggaggcagaggttgcagtgagctgagattgtgccactgcactctagcctgggtgatggagtgagactctgtctcaaaacaaacaagcaaacaaacaaaaaaccccacattatttcggctgggtgtggtggctcatgcctgtaatcccagcactttgggaggccaaggcgggcagatcacaaggtcaggagttcaagaccagcctggccaagatggtgaaaccccatctctactaaaactacaaaaattagccaggtgtggtggcaggcgcctgtaatcccagctactcaggaggctgaggcaggagaatcgcttgaacccgggtgacagaggttgcagtaagccgagattgcaccactgcactccagcctgggcaacagagagagactctgtctcaaaaataaataaataaataagtcggtagacagcaaagtagattgctctggccaatgtgggtgggtgtccttcgatatgttgagggcctgaagggaacaaaagaaattgccccctttcttccggcctcaccacttgagctgagacatttcatctcatctcctgggatttacatcatcagctcctccagttcccaggcctttggacttagactgaatggcgcccccagcttgtccgtctctctagcttatcatggtgcttcttagtctccataatcaattcctcataataaatcaactgggctgggcatggtggctcacacctataatcccagcactttgggaggccgaggcagatcacttgaggtcaggagttcaagaccagactagacaacatggcaaaaccctgtctctactaaaaatacaaaaattagccgggtgtggtggcacgcgcctgtagtcccagctacttgcgaggctgaggcaggagaatcacttgaacccaggaggcggaggttgcagtgagctaagatcacaccactgcactccagcctgggcaacacagcgagactccgtctcaaaaaaaaaaaaaaaaacactgattcctcataataaatctccatatatgtgtgtgtgtgtgtgtgtgtgtgtgtgtgtgtataaatctcactatgtttcccaggcttgtctcatattcctggctcaagtgatcctcccacctcagcctcccaattagttgcgactatagccccatatatatatatgcacacacacacatatacatgcacacacgtatatatacacatgcacacatatacacacaccaacatacatacacaaacatatatatgtgctattggttctgttgtctgaaaatcctaatacactggactgcatttttggctattttccattatatataatcattgtattagtaattttatcatgaacttgagagtcgactgagtttctcaaatctgtccctcatgtgctgggtatagcagaatttccccatactttctatatgggcatagatgttatttatttatttatttatttacttatttatttatttttgagatggcgtttcactcttgttgcccaggatagagggcaatggcacgatcttggctcactgcaacctccacctcctggcttcaagcgatcctcctgcctcagcctcccaagtagctgggattacaggcatgcaccaccatgcctggctaattttgtatttttagtagagacagggattctccatgttggtcaggctggtctcgaacccccgacctcaggtgatctgcctgcctcagtctcccaaagtgctgggattataggcgtgatccaccatgcccagcctaaataaaataaataaaatttattttattttatttatttattttgagatggaatctcactctgtcccctagtggagtgcagtggcacgatcttggctccctgcaacctccacctcctgggttcaagcgattctcctgcctcagcctcctgagtaactgggattacaggtgtgtgccaccatgcccggccaattgtttgtatttttagtagagataggatttcaccatgctggcgaggctggtctcgaactcctgaccttgtgatccacctgcctcggcctcccaaagtgctgggagtacaggtgtgagccactgcgcccagactcgggcatagatgttttaagatttcctacctagttgttattattattattattttgagacatggtcttgctctgtgagtcacccaggctggagagcagagcgatcaaagctcactacatgtcattcacagcttctcaaagaatgaaaaaaaacaaaaccaaaagaaaacaaaacaaaaaagctcactacatccttgacctcctgggctccagcaatcctcccacatcaggctccgagtagctgggaccgtaggtgccatccgtgctgggctaattttttttgttgttgtttaatcttttgtagagacaaggtctcactatattgcttaggctggtatttttttttctgtcctgcagtggcctctgtcctgtgcctctgtcctgcagtggcacaatctctgctcaccgcaacctccgcctcctgggttcaagtaattcttctgcctcagcctcccgagtagctgggactacaggtgcgtgccaccatgctggctaatttttgtatttttagtaaagatggggttttaccatgttgggcaggctagtctcaaaatcctgacctcaggtaatctgcccacctcagcctcccaaagtgcttgattacaggtgtgagccactgtacccgctgactgtcctcttttaagcccagtgacagactttctgggatgaggttgtgtacatgttttacattttttttggtatgactttaatgacatttatttttgagcaactgttttaaaattgacacttttttttcttttttctttttgagacaaggtctcactatgtttcccaggctggtctcaaattcttgggctcaagtgatcctcccgcctcagcctcccaagtagctgggactatagggccgtgccaccatacctggattaacacaatttttgagagcagttttagtttcacagctgatacattatttttaagacttattttaataacttgtcactcagtgtggcacctgcctttttgataggtctatctctgtctccactggttttgtagattctgacatagaaatgttggccatggcagatggcagatagagagcttcctccagatggacaggaccacgtctgctactccctggggataactgctccaccaagcccgctcacatcaccgaagcctgcatttgccctctggtcttgctgaaatgaaacccggacactcagagctttcctgccacctccctgaccaagcctacccaagaagaggcaaggttagtctggggagacttgttcctagctgtggcagccccctgtggtgatgtacccaatgccttatccatctttttctttcctactgtcagaaccctgagttttatgccaggtgcagtggctcacacctgtaatcccagaaccttaggaggccaaggtggaaggattgctagagaccatgagttcaaggccagcctggccaacatagccagactccatctttacaaatcatttacaaaaaaaaaaaaaaactagccaggcattgtggtgtgtacctgtagtctgtaatcccaattacgcatgaggctgacgcaggaggatcacctgaacccaggagttcgaggctgcagtgagctgtgatcatgccactgcactccagcctgggcaacagagcaagaccctgtctcttaaaaataaaacaaacaaacaaaaaaccctgattcttatcaagggggcactgtgtgcagctaaaatagtctccatttcccagctgtctttgcagcaaaggatgggcatgcgacatagctcaggccaaggtccagataagtccccagggtagatgtcccttctgaaaatcaaaaaggcataacctttccgggatatagcccattgccctttcctcccttctgcctacctggaatccctgtgctttctcatttcatcctcacattaggtacatggagaagggatcatcctcattttacatgtgaggaaactgacgttcagagaagcgaactgactttctcaaggttgcaaggctcagctagctcttccatgaaaactgaagtggccaactcactgcattgaaatgaactggcctggccgggcacggtggctcacacctgcaatcccagcactttggcaggccgaggcaggcagataacctgaggttgggagtttgggaccagtctgatcaacatgaagaaaacctgtctctactaacgatacaaaattagctgggcaaggtggtgcatgcctgtaatcccagctactcaggaggctgaagcaggaggatctcttgaacccgggaggtggaggttgcggtgagccaagattgcaccactgcactccagcctgggcaacaagagcgaaactctgtctcaaaaagaaaaagaaaaagaaagaaaggaaagaaggaaggaaggaaggaaggaaggagagagagagaaaaagaaaagaaaagaaagaaagaaattaactggccttaagtttcccattttggccaggctgccaggaagctgacggcctactgtgaagctccaatctagcactgccccttagcatggggacttagctgtctttctcttgtcctcagcacccgtcatgtggcttgagcgagcagtccttttctgtggggtgcctccggccctcttttggaaagctggggtggggaaatggcgttaatgtgtcagttatctatcttcattggcttctccagaccttttctccactctgcactgggcggtgggagatgacacgaatggacgtgaatgggctcttgtttctgcttgggctgggccagtagggagctctggtaggagggagcacggtcacagtctccccttgtcaggaagcctcatccacagggtcttgtcccagggagcaccccctctcctcccagtatcaggccagaggtgaatatcactataaatagcccggcaccctgtcctatcccttgcgctttcctatacatgcccacagctttgtaaactgtccccttaccacaatctcctcaaatcacccaattcgagtgtttcctgccagggtcctgaacacagagcacatataaagggcattgttggctggggacggtggctcacgcctgtaatcccagtactttgagaggctgaggtgggcagagaacctgaggtcaggagttcgagaccagcctggccaacatgggtaaaccccatctctactaaaaacacaaaaattagccggccaggcacaatggctcacacctataatagcacttcgggaggccgaggtgggtgggtcacgaggtcaggagatcgagaccatcctggctaacacggtgaaaccctgtagtcccagctactcgggaggctgaggcaggagaatggcgtgaacctgggaggcggaggttgcagtgagccgagatcgtgccactgcactccagagtgggcgacagagcaagactctgtctaaaaaataaataaataaataaataaataattagtcaggtgtggtgatgcacgcctgtagtcccaactattggggagcctgaggcaggagaatcacttgaacccaagaggtggaggttgtagtgggccgcgatcgtgccattgtactccagcctgggagataagagtgaaactactctcaaaaaaaaaaaaaaaaaaaaaaaaaaaaacgctgcggggtgggcgttgttaaaagatttttaggtcttccagagctctgaaaactctgtcccctccctgctgccccggctctagtcggcagagctcagctctgtgtctcatcacctagtgtctggaccttacagccagcccttaattggaagcacctccctgtctccagccccagccccacatcccaccaatcctctgtgaatgaagccatggcctccctccactgccctgagctccaggtggagtagaaagaaggcactgggccctgggcaggcacataggcaccacaggttctcaggtttgccgggtgcattgtaaccagcacctcctcagaaaggagaatttggggttgtgggtgggggaactgtcacatgagctaaaggacagaccaacgtgatgggtgaaatgacagttgtgcacggggcattgtggagcacagcaggaggggcacccgctcatccctgctgggggcggaggtcgtggagcaggtgtttctggagtcaggtctgagccgatcccggcaggtgaacagtggaggcacccagacagtgggaacagcatggacaaagaacaggaggaggctgctggctgtcacaggcacggctaagggcagagtaggtggtggggggaaggaagaggggaggtgggcaggagctggggtgggcccacagctgaccaacaaggggcctggacccaaagccataagcctcggggagcattacgcacggggacatctgccatattcactttaaggctggacgggaggagagccagccaggagcttgcctgtttgagagagaaacaaggcctggcctcccgaagtgagggactcatccccattcacctcctcccccgtcctcgccctacaagcgcatattgggttaaatccactccggctcccccaacactcctggctccccagcttgcctcttctagtccttcccacatgcaaggcagccctgaggacccgcaggacccagcaaagagggcgccaggccgctagggaagcccctcaactttcccaccccactcccctaaacagcctccaacgcatctgtgttatttttattttctttgctttggtctatacaaaaaaaccaataaccaaaaacataaagcgataataataaaacactctgcttggacctcccccagccccccacaccatgtgcgggaaatgggggggtctgaaacaggaaggggaagagaaagcccctcaccacacaccagaggggtcagccaagagcacttctcggggtcagctagggcagctgtgtgggtgggacaggggtgtgaggaagctgtccccagagctccctggggagtgaggggtgggcaaagccaactaagcaccctggagagagaagctggcatcttctggagcaggtgactcactccatatctcctccccatctcccctggacggtccctgaacttttcaagagaagttttggattttgggggtttgggtctcgaacctgggccctggaggccctgggggcttagggcagttggtcggtggagttcagtgagaaaatcagacccagagaaggaaccaaagcccttccgggcccaggcagctggagacagggaggctggaggtttggaggggcgttgctgggggaaaacagaatgggtacttgagtctgaagctttagtggccagggccacaggggcggggagggggtgtcaggccctggacccatgcccaggacagaaaagcaggagcagaacactatcccaagaaagaccctacggaggacctctggaggcgcagggtgcagcaggaagttacaccccggcttccccagctcaggcacttttctgtcttgccccatcgcctgcacggagagcctctcagatgaggaaccgcacctgttaggggagcggggacagacaggggtcaggggctcggtggacctgcatccccagaagctcaagccactccgtgtcacctgcccaccacccccagaaggggccagcaggaataggcctccccatccccaccaaagacacaagaagaaggcaggccagggcacaccgtgcttggggaagctcagcagcaaaggatccccccaaaaaaggagcgcaggtttcagcggggagatgggagggcctccaacagaaggaggttctagagaggaggaaaagcctgcaaagagggggccgtactggggccaggccgcctaggccagcatgtggtctgcagtggggtacgggggcctgaggccgtcgctgtaggtgtcgatggggtagtctccatccatgtccatgtgcatctccagcgggtcaaggggcacatcgctggagtacatggggcggtaggtggcatccatgtctggggacaaaaagtggggctcggtcctagggtctgcaagctaccctgcagggagcagtctgcacagccttcagctgcctcctctacccatgcccacccctggtgggcctgacccctccccagaccccacaccagggcatctagactggggtacatgtggatgccacacagcagttgccactggtcctctggccccggagacataatattgtcccctcacacacacccacacagccgcccaggatctccagggtcctgaagagcccggcacacacttaccatctccatagggctcattgatgggaatcatgctctgggcctgaaaaaggagagagaaacatggaggggaggtttgaaaatgcaggctccgagctggatctcagctggtgggcagggagagatgcttctaaaagagggggccaggctgggtgccatggctcacgcctgtaatcccagcactctgggagacagcaggcggatcacttgaggtcaggagttccagaccagcctggccaacatggtgaaaccctgtctctactaaaaatacaaaaaaaattagctgggcgtggtggtgcaggcctgtaatcccagctactcgggaggctgaggcaggagaattgcttgaatggggaggcagaggatgcagtgagccgagattacaccattgcactccagcctgggcgacaggagtgagactctgtctcgaaaaaaataaaaaataggctgggcgcagtggctcacgcctgtaatcccagcactttgggaggccaaggcgggcggatcacaaggtcaggagacaatcgagatcatcctggccaacatggcgaaaccgcgtctctactaaaaatagaaaaattagccgggtgtggtagcgtgcacctgtagtcccagttactcagaaggctgaggcaggagaattgcttgaaaccgggaggcggaggttgcagtgagccaagatcacaccactgcactccagcctggcgacagagcaagactccatctcaaaaaatataaaaataaataaataaataaaagagggggctggagaaaagcaaagaggccttggaggaatagaggatgatgaaatggggtcacccagtgccctgatatactcatgtcctcggtactccccagggaggagggttccccactcatgaagcagggactcctgccggactagagcagctcaggggaggaggcagaggactcaagaatgggtacagggcactgccccaccctggaaaagaccgcccatagcctatccagcacctccacgcaaattacaaaaaggcacccccacctcaaacactgtatactcatttgggcaaaataaaaattggcattttgtggatatatgattcaacccactacttccatctgctaggaattgttataaatgatccaattacaaaataaaaatctatgaagttgacagtagtaggagacccccaaaagtgttgcccatgggcagtgcccaacttgcacaaccaactactgtggtccaacctaggatactcacagcctcccaggcagccgggtcatgcttgaagagggagttggtgagctccacggacacgcgcttccggtagtctgggttcttgtcctcggagatgcggaacaggacggcagcagcgtaggtggctgagcagagaggaaaggaaaagccaggttaaacgtcggccagcctccatcgtggctgggggagtgggacccagcctcctgccctcccccagctcaccagtgccctcgttgcgggagtgcagcaactccatgagtggggccgaggccccctctgcatcaatggcgtcggccgcctccttgtcctgggccagctcacacagcaccccggcagccacgcgctggatgttctccaccgacgagtacaggagctggggagaggggacgtgggaagcaggggagaggtggaaaggggtgaggcaggccggacaacacaccccacagcactgcccacctccaccctgtagcaattccatagtggaaaatgggccgtcactggggagtaagtgttactgctttaaactgggctgagcattgttcatgagctaccttgaaattacctgtgactctgcctcatctaaccattggaatctagtgttaatgagctcactgatgtgaaagatgttagactcttcttgtctgttatggtacttgcacatattctcccagtttgctgattttttaaaaatgcttttttaggttctttctgaaatacagatggttttcatgtttatatggttgaatctcaagtttttttgttttttgttttttttttccatttgtgatctctttccttgctttgaagcttagaaagccatgcccatgcagggggttgctaagtagtcaatctggagtggcaactttcctccaaactcctccaaagacctcttgatacctggtccaggcctcccaaatctgggactcctaaccttgccctttaagcagtggtggggggacctctcctgcccacctgccccagactcacctgcacaaacaggggaatggtgttgagccggaagatctccatgcggttcatggggtcccgggcgaggatgtgcagtgctccggtgcagccctccacaatctcctccatcctcacaccatcctgtgtgagaggaggcagggggcatgggacaggtgccttggacatggccacaactcctccccatgacagccgaatgaacttcacaggttcttggaattggcatcagttgcaactgacctccccattcacacacacacccacagaggacaccctgaccccccaggaaggctgtcagaggcaccaccagctcacataccgtgtagggctgctgtgtgcctgcagctacgtggcgctgggcatcctggtgggccttcaccagcagttggacgaggcgggggatgaccgctgcctcctgcagcggggcatggttggctgggcacagggccagattcctgatcaagccgatggttgcctggcaaaaaaaggggcagtgatcaggggcacttcttggacatctgaaggatcccagcttcccagcttcaagtatcccttccctccttcacctcttctgtccccgaggccagacacagacatactggaaaatatccagagaaggagaccatcccagccatgtcacttaatccacaggatctgggagtgctcatggctaattcttttttttttttttttttgagacagagtttcgctcttgtcacccaggctggagtgcagtggtgcaatctcacctcactgcaacctccacctcctgggttcaagcgattctcctgcctcagcctcctgagtagctgcgattacaggtgcctgccaccatgcccagctaattttttgtatttttagtagagacggggtttcgccatgttgggcaggctggcctcgaacccctgacctcaggtgatccgcctgcttctgccttctaaagtgctgggattacaggtgtgggctaccacgtccggctgctcatggctaattctaatagcccttgctaaaatgacaccccattccagaacatcctgccagccccatgcctggcccctcaccctgtcccctctttcttaaccaccccccacagacaccatgaccttgcttgcttttctgatagtcctccaagcctgattctcaggaattctgtgctctaggtgcccccgaagcctcctgcttgggtggtgctcacattgtcattaatccccagcagggcagctctggaaagaggtgtcctgagatctcctccccagggtctttgactcagaggagccactctggcctcccagagcctctcaaggtgtcatctatttcatcctcaaaacaagacgccaggaggacagggatgaaaatcatgtgagatggggacgtgagcacagggcaaatgacttgccaaagtcacttgccacttagctgctgggttaggatgcaaagtcccacctcaggtttgcagcagggaccaagcatcaaggaggggtcacaatgacatttttttttctaaacatgaattttctttttttaattcaatgtataggccgggcgcagtggctcacgcctgtaatcctagcactttgggaggccaaggcaggcagatcactttaggtcaggagttcgagaccagcctggccaacatggtgaaaccacgtctctactaaaaatacagaaattagccgggaattgcttgaacctgggaggcggaggttgcagtgagctgagatcatgccactgcactccagcctgggcaacagagcaagaatctgtctcaaaaataataataataataaaaaataataattcaatgtgtagaatcacttagagtcattcttatctgcactgggttttttttgtttgtttgtttttttgtttgttttttttgagacggagtctcgctctgtcgcccaggctggagtgcagtggcgcgatctcagctcactgcaagctccgcctcccgggttcacaccattctcctgcctcagcctcctgagtagctgggaccacaggcgcccgccaccacgcctggctaatttctttgtatttttttagtagagatggggtttcaccgtgttagccaggatggtctcgatctcctgacctcgtgatccacacgcctcggcctcccaaagtgctaggattacaggcgtgagccaccacgcctggccatgttttttgtttttgttttccaagacggagtctctctctgtcacccaggctggagtgcaatgagcgatctcagctcactgcaacctctgccttccgggttcaagtaattcttctgcctcagccttccgagtagctgagattacaggcacatgccaccatggccagctaatttttgtattttttgtggaggcggggacttactatgttggccaggctggtctcgaactcctaacttcaggtaatcctcccgccccgtcctcccaaagtgctgggattacaggcgtgagccactgcgcctggcctgtctgtactattaaattgtcttaaatgtagctggcggatgcccctgccagctggctcctgtgcccgttgacaagaccctcatcgatggtagcttcctcactctctggcaccagatgccaccttgcctttggctgccttccttgtctctacatatagatatacacacacacaaacgctttcccccataactctgtcccttgggtctgcccacaccctgacccactctcacttcccccacctgacagggaagtgacacacagctagctctcttccacccaggtagcctcaagaagaagaccccactccttcacacacccaactccctatgggagatgctaagcgtccccagaatcctctgtgccctgtgtctctgtagtggctctcctgattttcagcaggacacacggccatctggctggtgatcacacttcctaacctccttgcaccttgatgtggctgaatgaccaagttctggggtgtgagcaggagtgatgtgtgccactttctggtggccgctagccatccccagttctcagggctagaacacatccgtggggatgatacagtccactcattcgtgtgaggacaaccctctcgtctacacccagtggcataagaaatgtgctccatggagcagcacctgcgagcttgttaaaaatacagaattgggccaggtgcagtggctcacacctgtaatcctagcactttggaaggccaaagtgggtggatcaccagaagtcaggagttcaagaccagcctaaccaacatagagaaatcccgtctctactaaaaaatgcaggagaatcgcttgaacccgggaggcggaggttgcagtaagccgagatcgcaccattgcactccagcctgggcaataagagcaaaactccgtctcaaaaaaaaaaaaaaaaagaagaaatacagaattgtccgggcctggtgtctcacacctgtaatccccgtactttgggaggctgaggctggtggatcacttgagttcaggagttcaagatcagtctgagcaacatggcaaaatcccatctctactaaaaatacaaaaattatccagacatggtggcgtgcacctgtaatcccaactactcaggaggccaaggcaggagaatcacttgaacccgggaagcagaggttgcagtgagccaagaatgtaccactgcactccagcctgggcaatagacattgtctcaaaacaacaaaaaaaagacatacagaatggcaagccctctgcagcaggcctgcagagagacagagagagagagagagagagagagagagagagagagagagagagagagagagagtgtgtgtgtgtgtgtgtgtgtgtgtgtgttttagattgtttatttgtttgggcttttttttttttccaaattttttgtaagagatgggtgtctcactatgttacccacgatggtctcaaactcctggcctcaagtgatccttccgcttccgcctctgcctgcacctcccaaagtgctggaactacagatgtgagccactgcacccagcctcctgtttttcttttcttttaagacacgggttcttgctctgtcacccaggctggagtgcactgatgcaatcatagctcactgtaacctccaactcctgtgctcaagcgatcctccgacctgagcctcccctccccagtagctgggaccacaggcgtgcaccaccacacctggctaatttctgttgttgttattgttgtcgagacaggtcttgctatgttgtccaggctggtctcaaattcctggcctcaagcaatcctcctacctttgcctcccaaagtgttgggattacaggcatgagccaccgtgcctggccctggaacctgcaatttaatgaaaccacccagggtactcatgtgcattttgaactctgagctctgccctaggggctggtagagctacaagatagaaatcccaattctggaattttagagcagagccattgttgaggtctaaactattacacgagagagaaataaacttctgtcttattcgagccactgtatttagggcttctttgctacagcggctttgcctataccaatacagcacctaagcctgctgcagggagctccttcccctcgcctaacagcagtaccttgaccagtggccactggttgggctggttgagcagcttcacgatggctgggatgccatagttgagacgcacagagttctgggccatctcggcctcagggtggcggctagtgaggtggcgcagagcgcagacggcaggctccgtgatgtcgtccttgtcaccagcacgcaggatggcatggatgagagcctccacaccgctgttctgtgtcaccagcgtcttgttcttgctgttgttgcatgtcaggttggagagtgtgcccgtggcacaggtgaggacgttgacgtcatccacactcagctgattcaccagaatcttcagcacactctccaggccctcctggagggcaaggaagggacgggggagtcagggagcagccaactccagggagccttctcgaatatgtccaaggggagtgggatgacctaaaggggtcagccctgcctgtgtgtgcccgggaactttcatccctatgacccgccacaccctgtgagagggcgttactatcctgtggtgcaagtgaggcaatgaggctcagagaggttggggaacttgcccacagacacacagctagtggctggatctgaacccaggcttggctctaagccccacatctcttccctccaactcatcagcctttccctggggccctcagacccaggcagaaccctcctcaggccaaagtacggtggccaagggaggcctcgagaccaggaggcaattgttgagggggccgcatgattcagtggcccagctgagccatgtctactcgcttgtcacctttctgggccttcactgctgccccaccaccctggggccctgagccaaatccatttccagtaaaatcactacctcagacgtctatctcacttctcccagggagacacgtgggccttgtggtggaacagaaaaaccccagctttggggacggacagtcctgggttcaaatcccagttctgccatttactacctgtgaccatggccattagctccccgagcctcagtgtcttcatctaacccacagggtcccacactctaaccccaggttgaatgagctactgtccacaaatgccacgcagagggccagcacagggtgagcacttgataaacagcatattgctaggggaggcctggggaatggttgttggaaggaggcacagggcacttgccctggagctgcatttttccttaaattgtatttttagtcatgggggcctgtctcttggtacactattgctccagcccagggcccaggtcaaaactgttcttttgctggatgtggtggctcacgcctgtaatcccagcactttgggaggccaaggcgggtggatcacctgaggtcaggagttcaagaccagcctgcccaacatggtgaaaccctgtctctaataaaaatacaaaaattagccagacatgatggcaggtgcctgtagtcccaactactcgggaggctgaggcaggagaatcacttgagcccaggaggcggagcttgcagtgagccgagattgcaccactgcactccagcctaggtgacagagtgagactccgtcagaaaaaaaaaaaaaaaaaaaaaaagagatgagggttttcaaggcatttccagcctcagtcacaaggaagagagatttagagcccccagtcctcccacagtacctcaggtcagatgcccagacaggaggctggatggggcagctgaagaggtcaaccccaggcccagatacctccctcacctgcttggtggccacatctgagaggttgcgcagggtccacaggcagttctgcaccaggcgggggctgttgctggtcaggtgcttgcccagggcctgcatcccacctggggcagggataggggtgccatcagccacggggagcatggctgactgagcctggcagctgggcagagctcccaccccagccgccctcaaggccatcatactcaccagcctccacaatggcaggcttattgctgggacacacggatagcaccttgagcacacgactggtggtccagagcagcttttcataactgtagttacgcatgatctgcacgagggcctggggcccaccattggccaggatgatcagctatgggtaaagagggaatgagtgtgagatggacggggaatatgacaggaacaaggaagcgcgggacaggagacagaactgtcattactgagcttcagctaaagcacgaatagttcgtttttttcttttaatgtatttttttctttttataaagatgggggtctcactatgctgcccaggctggtctagaactcctggcctcaagtgatcctcacacctcagcctcccaaagtgctgggattacagatgtgagccaccacacccagccaagcaccccaataagtttttttgtttttttttttgagatagagtctcgctctgtcacccaggctggagtgcagtggcacgatctcaggtcactacaacctccgcctcccgggttcaagcaattctcatgcctcagcctcccaagtagctgggattacaggcgtgtgccatcacgcccggctaatttctgtagtttttggtagagacagggtttcactatgttggccaggctggtttcaaactcctgacctcaggcaattcacccgcctctgcctcccaaagtgctgggattacaggcgtgaaccaccacacccagcccaccccaatagtttcatgactgttatgtaagccaaaattttgaaaaaaggataatacccagtgctgacaaggacatgacaaaactatatgcacacccattaccagttatggcactggaaattagtccagtccttctggaaatcaatctggccatttggggaaaagcctagaagtgttaaaaattgatgagaattttttccgctctttgacaaaggctagacattcattacagcattgtttataaaggtggaataggagcaatctaaataccctccctcagaataaagcctgaggtctccacttaatgaaatgctatctgtaggctgggtatggtggcccatgactttaatcccagcatttcggaggctgaagcaggaggattccttgagggtagcctgggcaacagagcaagacaccatccccacaaaaaatttaaaacttagcccgggtgctaattagctcagtagtatgttctcatagtcctagctatcaggaagactaagatgggaggaatgcttgagctcaggagtttgaggatgcagtgagctaggatcatgccactgcactctagcctgggtaacacagtgagaccctgtctcaaaaaagaaagaaaaggaaagaatgggaaggaaggaagaaagagaggaagagagggaaaggaaaaggaaaaggaaaaggaaaaaggaaaggggagggggaaaggggaaaggaaaggcaatctgtcattattagagggtggttttgaggacaatatagcaaaaaaaaattttttttaaacatcatacaggccaggcacagtggctcacacctgtaatcctgatactttgggaggccaaggcaggcagatcacttgagcccaggagtttgagaccagcctgggcaacatggagaaatcccatctctataaaaaattagttgggggtggggcacggtgtctcatgcctgtaatcccagcattttatgaggccgaggcagatggacaacctaaggtcaagagttcgagaccagcctggccaatgtggtgaaaccttgtctctactaaaaatacaaaaattagctgggtgtggtggcgggcacctgtaatcctagctacttgggaggctgaagcaggagaatcgcttgaacccgggaggcgaaggttgcagtgagccgagatcgtgccattgcactcctgcctgggcgacaaagtgagactccatctcaaacaaaaaaaaaaaaagaaagaaaagaaaaggaaaaaaaaaattagtcgggcgtggtagcacacgcctgaagtcccagctactctggaggctgaggtaggaggatcatctgagcccaggaagtcaaggctgcagtgagccctgattacaccactgcactctagcctgtgtgacagagtgagaccctgtctcaaaaaaaaaaaaaaaaaatcaggcagaaaacagatgcaatattgcagattgttatgatgacaaggatgtgtacacatctgtaatctgcccacagaacagctcttaaggaagcacatcgaaatgacaatagtggctatatgaggatgagtgattttttttttcccttatcctcaaaataataattctgggcaattcagtcgcatgatgaagcatgtatatctgcacctatatctcatctaaaaggagtaagggggcagcggcccaaggctgtgcaggatagaagatggcgcaagggtgggcttcaggcctcgggagagttggggagggcccaccttgctctcctggttgccgtaggccaggagctgcaggcagtcggtggtgatggccaggaacttggggttgttcttgttgagcaggggcaccatcttttgcagcccgtcggccaggcgcacggccatcttggcgccctcctggtacaggagcaggttgtgcagcgtggtgatggcatagaacaggaccgactccacaggggagctgggggggtgggcaggggttagtacgctgaggtcccagaggcctggcatacatgtgagcctggcatgggttcccacctcccccaggaagcctccccgctactgacgcccctctggaaatatccctttgctaaaatctcatcactccttgagcctgccctgctcttaagcatgaagcaaacagcacctctcttctcccaactgggacaatgactcctcctgcttctgagtccccagccctgtgctgagcgcacagtaggtcccctagacactgatccctactaagtaaccaccatgtggaaggccacatattagagaggccttgcaaggcgttcagaggggagtgaaatcagtgtctccccttcagggagcttccagcctggtatgggaatgagaaataaggccaggagcagtggctcacgtctgtaaactcagcgcttggggaggctgaggcaggtggatcaccctgaggttaggagttcgaaaccagcctggccaacgtggtgaaaccccgtctctactaaaaatacaaaattgagctgggcatggtggcagacgcctataatcccagcactttgggaggccaaggggggcagatcacctgaggtcaggagttcaagactagcctggccaacatggtgaaaccccatttttactaaaaatacaaaaattagccaggcatggtcgtgggtgcctgtaatccctgctacttgggaggctgaggcaggagaatctcttgaacccgggaggcagaggttgcagtaagccgagactgtgccattgcactccagcctgggcaacaggaggaaaactccatctcaaaacaaaaaaaaatagctaggtatggtggcagatgcttgtaatcccagctactcaggagactgaggcaggagaatcattcgaacccaggaggtggaggctgcagtgagctgagatcacgccactgcactccagcttgggtgacagagcaaggcctcatctcaaaaaaaaaaaaagaaatgaggccaatccacattttgtagggggccaggaaacagaaagtttgcaagggactttgcatttgctgttccctctgcctgggacactcttcccttcctctgcactagccaaactccactcatctgtcaatcccctgccattaagcgattccacctttgagcaatctcaatgctcttctgccatagcctgtgtcgtatcctgatcattaacctgctgtttacatgcctgtgttccctgctgggctgtgagccaccgagcacccggatggggtgtgcttctgcctggcacatagtaggtgctcactggatatttatggaagctcagggaagggaggggagaggcccaagtgagagggggtcctgggctcatgcagtgagcagggttgggtacctgagcatgcggaccagagcagggatgccacccgacttgaagatggcgagcagcccctcccggtggtgggagaggttgtgcaggatgctggtggtgcagcgggctgtgtccaggtcgctggtattctgcatggtacgcacgacagcggccaccagctggggcgagcccatcagggcccgccgcgacgcctccttcttcgacagctggttcacaatcatggccgccttggtcaccaccacctggagggcaaaggcaggggcggggacgtgagcactaaggagaggccgggatacccttccacagagctgaggagggccccagtcagactcatcacacacgggagagtctgggtcataacctccctccacccctacaatgtccctcccctgaggacatctgctctctcccctccctgcccagcccccaccctagcagggaccctcacagaccgggtcctcgtcgttgagcagtttggtgagctcgggcagggcgcgagtggccagctcggcatcgtcctggtagttgatgagatgcacaatggccgacttgagcagctgggacggctcggccagtcgctgcaggttggtggcctgcccctccacctgggtggccagcagaagcgagctgtcctcgcctgacacaccagggcacatggcctcccgcacccgtttggccctggctgttgtggacatctggtactccagatcacctgggggccatggggacagggactgagtgcaggcagtgggctgggcagacactggggagcagggcaggccacagacagccccacctgggtcctctgggctacctcttgccctgcccaaacccccagcacatgactggccattctacctctcaccaggaaccttggggaagtcaccatcacctcagtaatctctgtaaaataggccccacatgttctgtccatcaagggaatttttttttttttttgcacacttattatgtgcctggcagtgaattcaatgccctgcttatattttctcacataacctgacaacgaccctgcaaggtaagtactatcactggctccactttacagatgggaaaactgggcacagaggggttataaggcagcctgactcaggggcccaaacccctactctattctcctcccttacccatcaggtctgttttcaaccctgaaatctcaggagtctaattacaccctcatcatccccaacggtagcaatcctcccactatacaggcaggcaaacagaggcccagagaaccaccaacatcacatctcacagcagatcagagggaaagtcagggctgtgggttcagagagcaggagctgggtcctcagctgagacgtcaggttcctctctagcttccatcccctgggtgggtctgggagtcccacaggtaggtgcccaagcagccacaccctggcaactgtcctgatgcccccagggagagggacgcagaggttccaccctctaattagtcgagaaggaggagacagctgcatggctttcccacctggatgctgtactttttgctaccaacacagtgcctggccctgccagccaaaaggccccctgctacccctaccagctgtcagggaggagactggcatgcgagggctgagctccatagagccccaccagccacagtctactcacactactcccagcacccacagcccaccccctggcatgttcagggccctggaggcacctgtggccaacagttctagggcctggctattcctctctcccagaggggcaggggaggcttgggctggcggggcatccccatcccggactaagccccagagctgagtcagtcactcatcccacagccttggcctatctgcaggtcagccgcagaggcctggtctccctccaaccccaacgaggggccctcaggcttgacacctacacccctctacccaaaggggaatccctgggggttcctgggggctacggccctggctctcccacaaacgtgaggctcctgcagccaaagggctgcgtcctccctgccatccatgggctccctgagagccatagtgatacatcctcatcagactcttttttttactattttttgagacggagtctcactctgtcgcccaggctggagtgcagtggcgcaatctcagctcactccaacctctgcctcctgggttcaagcaattctcctgcctcagcctcccaagtagctgggactacaggtgcatgcgccaccacacccggctaatttttgtatttttagtagagacggggtttcatcatgttggccaggctggtctcaaactcctgacctcaggtgatctgcccacctcagcctcccaaagtgctgggattacaggcatgagccaccgtacccaatgtcttcatcagattcttatgttcacagaaggcaaggactatggcttttccttcagactggaggcaccctaagggcagggactatgccttccctccctactgatggttcacagaagaggattctgtgaccctcccagatgcagcaccctgaagtagctgcacctcctccttcagactgggtgggcccctagttagcatgagctgtgcctcctccctcagaccagagaccccctacaatctgcctcctttcactctgacctctctccaggacccaggcaggttttctgccccatgcaatagtccccaggggtcctgaccttggctggggggcaccccctgggtgtaagtggtggttttcttgagcgtgtactggcgcccgcaggcctcatcctcctccatgatgcccttgctgctgacggagggcacgcaggtgttggcgcccgagtggatacccgagtcgtaggtgtatgtctgctgccactcagtcaccttgataggctgctccatcaggttcatcacctccatcgtggctactgggggcacaaaggaggaagtcaggaagcaggaagtcacctggcccagcccccagcttcagcccgtcaccaagccccgcctgtcttcccacatcatcaccatggcccagggatttcaatgaggatgcaggctggggatggggggactgcccagaagggcaccaggcccagggaggggctgcccacgacgagataccctgggagcagtgagccccaggggtgcggctgtgtgtatgtcctgggcttgcatctctgacctcccagggggatgagccccagggggcaggacagtcaagggccagctgccgccagaagcccctgctcacgcaccttgctgccctgacccaactctcccaggggcaagagaaggcactcagggcttctagcagcttctgaggtcccctgggcccaccctcaactactggggctccctgggaaaggctgcagggaggaggcacccaagccattgggcaggaaactgggcggggcagggaagcggtctgacaggtttctctggagcgccccaggctccctcagagactccaggatctggctttcctacaggttgggcaggatcacacatggccctgaggtccagaccctaaggccccctctctcccagccctcccagtccctagacgcctctttgagtcccacagagcaattcaaatctcagctactcactactggggcagttcctctccccacagaacctcagtgtcctcatctgtaaagcggggtcacgccacctccctcagaggtggttgcgaggacctggtgcatagcaggtgctcagaggccacggccattatcatcagcactgcctctcctccagaagtgcttcctcacctcctggtctcctcgagcccaggctagggatctggggtggggcaggcctgtgggtggtcactgccgtcaggaacccctctctctctctgcaaaggtttaggcgcacctgaaggttaatgagtagcagggccgaactttgtaccagggaggtgaacttcccgcttggtctgtgtttggctccactgtcctgggaactgacctgcagaggtcagaggctgcggggagaatggacgccgtgatcccatgagggcctactacgagccagacctttcacagacaccgtcatgctcatgggcgggtttcaaagcccatgcactggtcccccgcgtacagatgcagaaactgaggttagaaatggcagagctgggactgggaccaggtgtgagggcaccaaggtctgtagtctttgcacatcccggcgcagcctcagtgagtaagcagaactcaggctggtccacccatgaagccaggcagcacccgggttgtctcactgtgatggggaccaggtgagggtggggtggctggggcaacctggccccaccccaggaacaaagatcaccaaggataagtcttccctgtgactgccccagtgccgccctggccctccaggaggatgacgaatggtcctgcaggtctcccagccttttatggcaggcagccgtgagcacacccggaacaggcagaggcaggggccaggccagctcccagctgcctccttcctctcctcccgcaatccctagtgactcagagtttcaggctgattaaacagaagcagtcccgccacctcagacggcagaccccagacgacaggctcgggccgccagatgtgcacagctgcttcccaggcattcgaaagtgtagctatttcagaaggagcccccccaaccagccccctttccacacgcaccccttccccacaccccttccccagcaacagaggggaatggccactggcaggaaacaggggcaatggtggggggcggggggcggggtgctcggagaaggcagacatgggaaaaccctactaaaatcctgagctcctcgtgctgtgccgccttccccaaccatttccctgccccaagggcaagtcccaagagagagcagaggagagtttggaagagaagctgcccccaggagagaaggaaggtgcaagtgtacaagtaaacacggtagcaataacccactgaatgccgctctgctgggctcaaggctgaacgacatctggacactgctggacatctgcagctctggtcaacaaacacactgcatcccagccagagggccctcctgcatagacagtgcctaaccctggggcttctcagctaagggagagggaagcgggcctcactccaaacaagggtcaccccttgccggcctcacatctaaagggaccaccacagtcaagctgaggaacttcctcagcaggcccctcaccacccccaccagcccaggtcaaccgccaggagactgctgagggctagacagctacccagggagagacagaagccacaggatgccatgggggggtgggggggtggacgcccagtggcctttattattatgtgaatctcattcttccctcaaagcaaccctggcagatgttttataatttccaatttctttctttctttcttttttttgagacagaatctctctctgtcgcccaagttggagtgcagtggcatgatcttggctcactgcaacctccacctcctgggttccagtgattctcctgcctcaacctctgaagtagctgggactacaggtgtgcaccaccacgcctggctaatttttgtatttttagtaaagaccgggtttccccatgttggccaggctggtcttgaactcctgacctcaggtgatccgcccacctcagcctcccaaagtgctgggattataggcttgggccactgtgcctggctttattcccaatttctaggtgaagaagctgtgcctgcacactgagaaaatggcagcacttgtggtaggaacagcatccagtccactagacaagcctgggtggagctgagccctcttgccaaggggaggaggggaccaaggtgcttgcagatggaagcagagcactcggctgcaaatcaagtgtcccaggttcgggtgcggtggctcacacctgtaatcccagcactttgggaggccaaggcgggcagatcacgaggtcaggagttcaagaccatcctggtcaacatggtgaaatcctgtctctactaaaaaagtacaaaaattagccaggcatggtggtgtgcacctgtaatcccagctactcgggaggctggggcgggagaattgcttaaaccagggaggtgcatgttgcagtgagccgagactgcgccactgcacttcagcctggctgacaacagagcaagaccctgtctcaaaaaaaaaaaaaaagagtcccaggttctagtcccagctctgccacaaacttgctgggtgtccttgtgtccctggatctcaaaggaatgttgatgtctaagattctagaaataaaaaaacaggattcccacaacagacagaagaaggctgggggtgggcaacgtcagagttgggaaccagttcagagagaggacacactccagaactcctcctgaggaaggggtcacgggagctattcctgcaacaggaaggctggaagtcagacctcaggcaggactgtcaaccagccccacccttctccttacctactgcccaggagaacaaaggaacttctctcacaagaaacaaaagtgctggttttacagttcccagggtggagggggccacacccagttcagtcttgtccctctccaccctggacctggagtcagacctcctgcaatgcccctggacagagccagggtggaagcgagagagacagacgcaggccctgcccactcatcccagccagagacgggcagggacagagacagggcgggtttctgagttgaatggggggcctttgtttagagcgtgctctattgttagcagcacgggaggaagaagccagatcagagactgtagggacagcccaaggacaggaagaaggaagacgggccctggagagggggtgcagaggacccttccccatgggacccacaccaggtaagtgtgagcaagtaataaggctagactgggtgcacccctacccttctttcctgcctcctcctctgcgcagccaacccagagggctggcaccgggcaccctaaatccaagactgacctggcagagtgtggcccagccctgacattaaaaatagccccaccagagctacaccaggctccttccccagccggcacctgccaaggacagtcagcaatgggcacatctaggctgggttgcagggcaccaagtgccaagacacctggaaataaggacaggagtgggttaccccagaggccgtgctggaagcagactcagaagcattgcatttgggaacagaggagcagggcggagcagggcagggctgggtcccccagaggttccttaggctagaggccagcaccctgtgcagacacaggtccccaggctcagacagcgacagggtgagcacaggattctgagtgaggagaggggctcaatttccttaagcctcattttctcatctgtaaaatggagatgatcaagtgacttcttttgtcactgtgactctggaagccctctgtccacaggaaaggcatgcattctcatgctagaagaacaaagagatggcagaggaggcggaagccagctggcgcagtggctcgtgcctataatcccagcattttggaaggcggaggtgggagggtcgtttgagcccaggagttcgaaaccagcctgggcaacatagtaagaccctgtctctacaaaaaataaaaagaaattagccgggcatggtggcatgcacctgcagtcccagctactctggaagctgaagcatcacttgagcccaggtgattgaggctgcagtgagccaggatcatgccactccagcctaggcaacagagcgagaccgtgtctcaaaacaaaaaggtgagggggccaggcgcggtggctcacgcctgtaatcccagcatattgggaggccaaggtgggtggatcacaaggtcaggagtttgagaccagcctggccaacatagtgaaaccccatctctactaaaaatacaaaaaattagccaggcgtggtggtgggcacctgtaatcccagctactcgggaggctgaggcaggcgaatcacttgaacctgggaggcggaggttgcagtgagccgagatcgcaccaattgcattccagccagggatacagtgcgagactctgtctcaaaaaaaaagaaaaataataaaaatttaaaaaggcgagggctggcacagagacctgtcgggcaaggtggatggcagtctgtctgggggagccctggctgctttctctgacccctgagatggggactaggtagggagctgcctcccaggccctggggaggtcaagggaacatggctgaggagaaggggagtggaacttcgctcacgccaggtggagacactggctgccctatgcccagtccatgctgcttcctgcagccaggggcagctgcacagccaggcgtgaacattccccacatagcagtcccagggggaagctgggctcagcaggatctccagcccccaccttccccactctgtccctggctcctgctgaggtctggccagcagttccaagcacagacacagactctagaaagtccagagagatggacatgatggcttcccttgagggcctgtttccctctcaggctggggctgcccaaggaggcctctcccctctggctggcagctccaggacggaacctcctgcagactacaggttctctggcagacactgtggtctccatcagcaagctggtccattccaagagggcagaactgaagcaggagctgtcagacaagctggtcttaggcttccggaggaaaaccctcacttccagtctggagagcagcccaggctgtggcctgaggatgagctggggcctgggggaggctcaggcctgccgacccagctgctgtttattttcctccttctgggctccttcccaaagcaaacaaacccgggtaggaaaatgaaggggatttgtaggagagggaatttgccacggccaagtggctcgacccagggacctctatgctcccctggagagggctccagctggagctccgttccctgctggtgacccccgtgggcagattcccaaactggcagatgaccccaaaccgggactcctgggaatggaaaaacacttcaccccacaccaggaaacaacaacaaaaggttgacgtgtgttggtgacgcaaaatacacaagtactctcattccactgcctccaaccaccaccagtggggcttgggcagcctggggtccaggggcggcccacttctcaataacagcagctccgatcccagctgactgaggcccactccctggggtgtgattctgcaaggatccctacatataaccctctcctgggaagatccatctgtttattgtacaacacatgctggaaaaccaggattggaataaagttttggctaaaatctgttactgtaggcagggtgcagtggctcacccctgtaatcccagcactttaggaggccaaggcaggtgaatccccttgagctcaggagctccagaccagtctgggcaacatggcgaaaccctgtctctacaaaaaaatgcaaaaattagccgggcgtggtggcatgtgcctgtagtcccagctacttgggaggctgaggtaggaggatcgcttgagcccaggaagaggaggttgcagtgagctgagatctgcactccagcctgggcaacacagtgagaccccatctcaaaaaaaaaaaatgttactatatacaggggatgagctcatcaagatcaaggctaaagaacaaaaggatgttgccgagcacggtggctcatgcctgtaatcccagcactttgggaggccgaggcgggcggatcacgaggtcaggagatcgagaccatactggctaatacggtgaaacctcatctctactaaaaatataaaaaattagccgggcgtgttagcgggtgcctgtagtcccagctactcgggaggctgaggcaggagaatggcatgaacccaggaggcggagcttgcagtgagccgagatcctgccactgcactccagcctgggtgacagagcgagactccgtctcaaaaaaaaagaaaaaaaggatgctaagaaaagaggaagagacttggctgggcgtggtggctcatgcctgtaatcccaggactttgggaggccaaggcgggtggatcacaaggtctggagtttgaaaccagcctggccaacatggtgaaaccccgtctctactaaaaatacaaaaaactagccaggcatggtggcaggtgcctgtaatcccagctactcaggaggctgaggcaggagaatcgcttgaaaccagaaggcagaggttgcagtgagctgagattgtgccactgtactccagcctgggcaacaagagcaaaactccgtctcaaaaaaaaaaaaagaggaagagaccttaatgaaagttgctttttaggattatgggcgattttttttcttttctcttaaacttttctaaacttcccaatttttttttttttttttttttgagacagatgtcacccaggctggagtgcagtggcacaatcttggctcactgcaagctccgcctcccgggttcacgccattctcctgcctcagcctccacagtagctggaactacaggtgcctgccacaacgcccagctaattctttgtattttttagtagagacggggtttcaccatgttagccaggatggtctcgatctcctgacctcgtgatgcgcccgcctcggcctcccaaagtgctgggattacaggcgtgagccaccgcggctggcccccagttttttttacaatgatcagatattactttttttattttctttctcttttttgagacaaggtctcgctctgttgcccaagctggagtatagtggcacaatcatggctcactgcagccttgaactcctgggctcaagcaatccttccgcctcagcctcccgagtagctaggaccacgtgcacatgccaccatgcttggctaatttttttttttttttttaagagatggggtcttgctatgttgcacaggctggcaggctggtctcaaagtcccggcctcaagcaatcctcctgcctcaaccttcagagcggttgggattacaggtgtaagccactgccccagccagatattaccttctcaatcaaggaagaggaggagtctcccctaaataagcagcttattgattgccaagcccctgtcccaactctgctctggtccctgctactgtctccatggtagggaaagacacagaaagctgagcttcagctgggcatggtggctcatgcccataatcccagcactttgggaggctgagatgggacaaatgcttgagctcaggagtccaagaccagcctgggcaacatagcaagaccctgtctctacacaaaactttaaaaattagctgggcatggtggtgcacacctgtggacccagctacttgggaggctgggcgggaggattgcttgaacccaggaattcaaggatgcagtgagctgtgatcacgccactgcactctagcctaagggacagagcgagtccctacctcaaaaaaaggaaagaaggccgggcgcagtggctcacgcctgtaatcccagcactttgggaggctgaggtgggtggatcacttgaggtcaggaattcaagaccagcctggccaacatagtgacacccccatctctactaaaaatacaaaaattagctgggcatggtggcgcatgcctgtagtcccagctacttaggaggatgaggcaggagaattgcttgaacctaggaggcagaggttgcagtgagccaagactgcactactgcactccagcctgggcgacagagcaggactccatctcaaaaaacaaaccaaaaaaaaaaaagaaagaaaagagaagaggagaagggaggaggaaagaaagctgagtgccaaaagcggtggctcacgcttataatcccagcatgtcgggaggccaaggtgagtggatcacctgaggtcaggagttcaagaccagcctgaccaatatggtgaaaccccgtctctactaaaaatacaaaaattaggccgggcacagtggctcacgcctgtaatcccagcactttgggaggccgaggcgggtggatcatgaggtcaggagatcgagaccatcctggcaaacacagtgaaaccccgtctctactaaaaacacaaaaaaattagccaggcgtggtggcgggcgcctgtagtcccagctactcgggaggctaaggcaggagaatggtgtgaacccagggggcggagcttgcagcgagcggagatcgtgccactgcactccagcctgggcgacagagtgagtgagactccgtctcaaaaaaaaaaaaaaaaaaaaattagctgggcgtactggcaggcgcttgtagtcccagctacgcgggaggctgagacaggagaatcacctgaacccgggagatggaggttgcagtgagccaagattgtgccactacactccagtctgggtgacagagtgagagactccatctcaaaaaaaaaaaaagaaagaaagaaagagaaaaagaaagctgagcttcctgctctgctggccccaaaggccaagatgccaggaggctgagcaaaggagagtggtccatgagcttgcccttcaggcctggcagaggaagtcgcttcacaataagatattccatgtccccagactcaaccatgtcccaggagaggccgctcagtgtcacttgcaggaacacaagccctggtgacctgcccagccacactgcttgcttttcctcttcacaggggtcacaggaccagctcacagatgcctttccctctcactgccaggtcgctcttctcccaaaagatacaaatgaggagtctccccaaagggcagcaattcctgtctggcctccctgccgcacaggatggccctcatcagagaagagtcaatgctgagtctccacctctccctcttatttctcaactcaagatttcatctttagcaggcagaaagcccctcctcctgtctagactgcgtcccttcagtaagtgcatcgggcctgcagctctcaagtcctcgggggagatggaaaaactgcaacctcatgccctctttgtagtagtcagtgggatggggttcattctgttttcttctctgtctcaagtcccattagccttctccacgatcaataatcccgttgcctggggtccccgcctgccctcagggaatccagaagcgcggtagtgacaggttcagtactccggctgcaccatcacataaagagaacccatttcccagaccccaaatccaggcccattctggtgtcagatgtccagttggcagagacaccagaaccaggcaggtctggagaacaatctgacaccagctcctccctagagggccaaggctctggctgacaggcagcacacatgacccccacctccatcaccagaaaagccctcccagcagctgcctatctcaggtctcttgggcttcagagcagaggacagccagttccccatcaagagcagcctggcagcactgcctcgtcaactccagcaggacattagcccaggcctaaatcggactctcgtttctcgccaatccccacagggcagcacccctttatcttggcatagccccagcccccagcaaagcaggcaactcccacttcctacacatgaacaagcccagaacagccatggttctacctaacccaagctaggaggcagcacagctttgacccctgcctcctctttccctctcaacctccccccaacactcaccacagccctggccttggggagaagccgcttccaccggaaactaaaaatcaagccactggggagatttaagtgggctggtggccaggacaggtatcacccccacctacaaaacctgccctacattcaccactcacacatgccttcatgggcccttctgaattctcttctccccagtcaggcagaggctctcaaaagggggtgcagaaaaatcctttccgctcacacctgtaatcccagcactttgggaggctgaggcgggcggatctcctgaaggtcaggagttcgagaccatcctgaccaacatggtgaaaccccatctctactaaaaatacaaaaattagcctagtgtggtggtgcatgcctgtaatcccagctactcgggaggctgagacaggagaatcgcttgaacccaggaggtagacgttacagtgagccgagatcgcgccactgcactccagcctgggtggcagagcgtgactccatctcaaaaaaaaaaaaaaaatcctttccagagctgcatggggcaatacagcaggatgggttctgggcttggaatcagaggacccaaacgtcagtcttggtgctgcttgggtctcgctgtacaacattggggaaattacttaagttccttgagtttcaatttcctcctctgtagaatgcgaataatgatacgcgttttttttgttttttttttttttttgagtcagggactcactctgttgcccaggctggaatacagtgacacagctcactgcagccttgacttccctgggctcaggtaatcctcccacctcaacattcccagtagctgggaccacaggcatgcaccaccacgcccggctaatttttctatttttttgtagagacagggtttctccatgttgcccaggctggtctggaactcctgggctcaatcaagcagtccacccttctgggcctcctaacgtgctgggattgcaggtctgagccatccagcctggccagccataaggattaagtaaaaatagttaatgaaagtgcttggtttgggccaggtgaggtggctcacgcctgtaatcccagcactttgggaggccggggcgggcgaatcacgaggtcaggagatcaagaccagcctgcgcaacatggtgaaaccctgtctctactaaaaatacaaaaatcagccgggggtggtggcacacgcctgtaatcctggctactcaggaggctgaggcaggagaatcacttgaacccaggaggcggaggttgcagtgagcctgggtgacagagcgagactccatctcaaaaaaaaaaaaaaaaaaaaaaaagaaagtgcttggtttctgtaaagtcttaccttgatcttgagttaccgtttgtcaagtacttactgggtagataggtattagtattcccattttgccaaagaggtcactgaggctcaggtaatgagagacagagctgggtctcaaacccagctcagttcaagcccaaagccctgtgctcagaactgccccactgtcccatctctccaaataaacagtccttctgtagactagtcaattgacccatctcactctaaggtggctccaggatgggaaaaaggttggcagccctagcccgacctttttcgttcctatgcactgcattctcaaagcctcggccctggcagcccaaacagaggctccagagggaatggggtggagccagggtgcaagggaggggtggagtgggggtgggagggctcaagtcacccaagctggggcttgatctagcaagaaatgactaactgggtcctaccttctcctcctcccccgcatcccccagtccagtcagtggccagttttcaccaagcacctcctagcagtacttcctcagtattatcttttcatcacagccacaaaccagattagctaaactaatcatgtagccaacataattacaatgccctcccctcctccaccttggcacagagaagagggaaagcaggttatttttgcccaaactccctgctcctgttgctccccagaggtgcagaatcccatcccccggcagaaaaggatctgagttcccacactgacttccccctagcacagggctgagcgtgatccccacccaggataaaggggctgagtctgggcccccagcctcactcccccatctacaacaaagaaagaggtggtagactcttcccctccaagcactctcgatccccgccccccacaatctttctcccacccccaggactgagagagaacccaactgttgtattctctctctgttccccaacgaggctgggctccaaatcctgcaaaaagaccacatttcagattttttttttaaaccggggtacaaaccctgatcaagatccccaattctgggtgggggggggcggtctcaggaaattgggagcagggaaggcagggggcccgatgcagctctgcctgagagagtctagcattgaagaaaccttcccccaaaaagccttcctgcggtctcactttccctgtcaaattctttcaggaaagcgggtgggaaaggtctgtgcaggcctccagaaagcatgcaccttcacaattcagaaatcaaatggaaggcaagtcccacagcctcatgcgcttctgcctcaataaccagccagctaagtaatgtgggggatggggtagaggcaaaaaaaaaaagacaagaacaaccactccccccaccttcctcagtttggcccagccctgccccacccccattcctggggagggggcagagcttgagagacaaccacttacgcaggccttgtctgagggggtgtggtggtcccaggaggcaggaagagaaggaagaagctgcttcccctctcagcactttccaccccccaccccggcccctacctcaggcccctggggcccagcgaacaggatgaatgtgggggcagggaagacagggtcggagcccaggcaccggcccaggttcagccaggggccggctgggggaaggggttttgcaccaggaaggaccccctaagcctaaaggaagttttgggcaaggagacgggaaaacccccagataaagctgctgtgaatacttcctcctgcaaagtttgttttgggtgattttttccaacaataagaggttagagaagacgggtcctgttcccctaccaacactctggcagccacagctactggaaactgggccaggtgaccctgaattcttcatccgtgcacagaccccaccccccagaccccagggcgagccacgggtgccagacaccagctggacactgagccgagccctgcaccccccagtcactccatcccacctccgctgaagaagccagagccgggctcccaccggcgtggagggaggcgccgcaggtagtatcgacgaggctctgggagctggagggcagggcctctggactccgtgcgctcacctgctcggcaggtggggccagagtcgctgggaaaatgtgcgctcggcccccacagttgggcaagctgggcgcaaacaatagggccccacccaggcctgggggagtagggagggagggaaagcgaggatgacgcgtggggtggggtgagggtggccccaaagagaccagcggcagcaagttccccaaacggtaaattcctgactgcagcgtgagccctgggacgcagtcgaagcagagcaaagtctcccccgccagcccagggcgagagtcagggacgcggcgtcgggcgagctgcgcgggccccgggggaggcgcgaccccggaggcacctgtccggatccctccccgccttgctcagatctctggttcgcggagctccgaggcgcgctcggcccgaaccgcgcgacccccaagtcgccgcgcccaggaccccagcgcgccccctgccgccggtgcagggtggcgctcgatggcaccggccctcacctgcccagggacggctgggaccggccccgcggccgctcgccacccctctgtccccaacgatacctgcgcccccgatagcccgcacctgagtatggggcctgaccgggccgggtcggggtcgggccggggtgggagccggcgcggacagcgaactgagctcggcgtggtcgggcggcggctgctccggactctggccaaggcagcaactcagtaaccgaacaaaaggcgaagagacctgacagccaagccacgcccctcgccacctcgaagctccgcccctgggggagacgcccaccctctggtgcgagctcactggctatctcgcctgactgtcccgtggaggggcggagcctcgcctccagtcctcttccacggccgcctctgtttatccgcttgccattggccccggggactgccagtcggctctagggatggactctaacttgaggtctcatcctaacattgcatctattggcagatagaaagttacttcctcctgattggacaaggctctgtcagtaagactaaggaaaaaaccaatggaagggatggggtgtgtcttgccccacccttgctctgagcaggtgagactcattactctccccttccccctacctgtccaacaggtaagtcatagggataccaagggaagggacagacgccttcaccggccagccaactcagcgtcaggcatgatgcttctttgggcttattcatccttgccccaaagtagtaatcacatatttgtatagcatttcataggctttgtgctggggtgggatttttttcccgaaagatggagtactcctgggatttagaattagaaggccaggtttggtcttctcccacttggtatgattttaggcaagttacttcaccctgtttctcctcttctgtaaactggatacattagccatatctacctcactggagtatgtggggattaaatgaggtcaggtttgtgaaagcactcagaaactgctaaaggttagaaatttaaattaacggtatgtttttttttaattattgtgacagctctgaaaaatagttaggatgagaaaacgaccctcattgtaaagatgaagaaaccgaagttcagagaagtcacaaaactacaaagtggcacaccccaagctagaacctccttcctctcatttgaaggaccatcaaaccagctgttcccctcatggaagaggagcatagacataaaatgtcaaggcaatggggaaggggcagagaaaaggcacaaacacttggaggagagacagaacaattaattggcacaaaaatacagtattggtgtcaggaggctttggtgggcttggaaacatcaagcagcagatctgaaggaaatccagccctggcatgaaagaaacggggcaggccaggcgcagtggctcactcctgtaatctcagcattttgggaggcaaaggcgggtggatcacctgaggtcgggagttcaacaccagcctggccaatatggtgaagccccatctctacaaaaaatacaaaaagttagccgagcgtggtggcgggcaactataatcccagctgcctgggagactgaggcaggagaattgcttgaacctgggaggcggaggttgcagtgagccgagaccatgtcactgcactccagcctgggcatgacagagcgagactccatctcaaacaaaaaaaaaaaaaagaaaagaaaaaaataaaccgggcagcacacccctctgcgataggagagcctggggtagagatcagagagaacttctcggccaggcgtggtggctcatgcctgtaatcccagcaatttgggaggccaaggtgggcagatcacttgaggtcaggagttcgagaccagcctggccgacatggtgaaaccccatctctactgaaaatacagaaattagccaggcatggcagcgggcacctgtaatgccagctactcgggaggctgaggcaggagaatggcgtgaacccgggaggcagaggttgcagtgagctgagatcatgccattgcactccagcctgggtgacagagtgagactctgtctcaaaaaaataaaaaggacttctcacaggcagcttaagaagacaagggcacttcctttctgtggttgatgacatgaatgctgctcgtggctgtatggtgtgccaagggccctacaaacattccttcattcaacacttgagtattcattgtcaactgtatgttaggcactggtgaacacagaaaataaaacctggtgacacaggaaataaaaatgatcccaaccttcaaagagctcatagaaggataagcagaagcagcgtgtgtgggtgggttttggaggagtggtggtttagaaaagggtcccccatcaacaaagctctacagccccaaagctagcacacaggatgggctggatgaaggtaccttagcagcaaccttgaccactttccccaccagagaaaagaatggtagctgaacattctcccttctgaagttgcgccatccaaaagcagggccagggagatacggacatccctgaactagtggccatcccataaccagggccaccgccctttgcctgtttcctcaactctccatcctccagcttacctccctatctttatccctgccttacccctgccccatccacctgcttgtcaccctgtcacatagagctgtagccaggccacagctggggaaggaatgggctcacaatcctggactgctgcagctgccagggtttcatttcttcccccttctgcccacctcccacctccacacatgcacacacacatacgtcccagctccaagcctggcctgactccttcctatttctcctgacctcagcaaagaggcagggtagggctggttgactgcagagaggggtggaggagcccatgtgggtggaggagcagaaataaggtttcagaataaaccgtgtgtgtgtgtgtgtgtgtgtgtgtgtgtgtgtgtctccccagaatgccccctgcgtgtcttagcatggaacatgttgcataacaccagccccagagctaaacacacaggctgggactggtggaagcaccaccacagcagcggcaaagactgggattagagctgagtctctcctcccagatcaagggattctctttaagcacctactatgtgcctggcaggcactgagattcatctgtatctgagaatacagaatagaatcagaaatgatgtttcctagactcagctgtctgcacaggcaatttggtctcttgtgaaaggaggtatgtagggataggatgggggtttctgtgaccacagtctcccctgtagcttgaacttgaagaaaaggccgcaaggtcatcttatccagtcccctgcctgcaaacctttaaaggcaagaattctctgacaaatgtccaggaaagaagatcctgcagcctcccttatggtgaatgcccctgtctccttgttctaatgtccagcctcaattcctattcctgcagtttcaattccttcctcttgcccagggctcagtggaagcagagtccatgggctgccaaaaacacatatgggtaactcaaccttgcagcttgctagtgcttcagagtagagaatataagggtaccacatggcccatctcaagctgctgcagagacagaagtaactggcgcagagaggttcagtgagggactggtgggagggaggctcttttctaggggagggtgcacaccatcagccagtgtccaggaccaccaggccaccgtcctctccttatctcacaacccccctcatcttccacgaggcctctgggccatacaaggagatggaagagtttctgttctccattcaaacacagtccttagggccgggcacagtggctcatgcctgtaatcccagcactttgggaggccgaggcgggtggatcatccaaggtcggaagttcgagaccagcctgaccaacacagagaaaccccatctctactaaaaatacaaaaaattagctgggcgtggtggcacacacctgtaatcccagctactcaggaggctgaggcaggagaatcgcttgaacccgggaggcagaggttgcagtgagcagaaatcgtgccattgcactccagcctgggcaacaagtgcgaaactccagctcaaaagtaaaaaaaaagaaaaaaaacccacagtccttattctatgggggccttttccccagagacaggtagaaatttagacgtacacaagccacacacacacacacacacacaaccttctatgctcacacctcagggatatacacttgcgggtgcagattcagatacacaaacaccagctttctctaatacacgcgcgcgcacacacacacacacacacacacacacacacacacacccttcttcctgcctcttcagcctcaggtagcctaagacataaccacttctataaaggggagcccagggtgaccagctgggttgccaaacttcaggctgatgatggtacattttcatcacccagtagcctcttccccgcgctttgcagcagcagaaaaggaaatcacacaacgggaggttcttcccggatggcagacttgaaagaaaggcaatgcagaaagctagaggcaccttgggtatgagccatctctcagcccagggacaaagccagccttttttttttttttttttttttctcagagacagggtctcactctgctgccagaactggagtgcagtggcgaaatcacagctcactgcagcctcaacctcctgggctcaagggatcccctagcctcagcctcctgagtagctgaccacagccgctaccacacccagctaattttttttcttttttttggtagagatgaggtctcaccatgttgcccaggttggtctggagctcctggcttcaagtgatcctcccacctcagcctcccaaagtgtggggattacaggtgtgagccaccacacctggccagagccatctttacacccagtttctctccaggtcctggcctgttttttgttttttgttttttgtttttggagtctcactctgtcacccaggctggagtgcagtggtgcgatctcagctcactgcaacctccgcctcccgggttcaagtgattcttctgcctcagcctcctgagtagccgggactacaggcacgtgccaccatgcctggctaattttttgtttttttttttctcagtagagacggggtttcacagtgttagccaggatggtctcgatctcctgacctcgtcatccgcctgtctcggcctcccaaagtgctggaattacaggcctgaaccaccatgcctggccgatcctggcctttaaaaggcctccactctggccctcctggggttgccccctccacacaggggcaaagggacagaggagcctacatggacttcacattccttctagaccacactccagggaccagcaccagaaactctggaattcctgcccaacactgaccctactttccaggcctgcaggtcgctgactctggtccttctccccaggagcagcggcaccagtgctactgtgcatggacacacttgggccaaactagggacatgacaaagggcagttattgctggggtggggagatagaggcagcatggatgcgcgctaggaaatctccatgcaagggctggaggaccttgtggcgcaggcagagccagaggtgctaaggaaagggaaatagtccaggccctggctgggggccagggaggagccgttctccatggggctgccatgccctgacacagtgagaacttgggactccatcatggactttcaggtcatcgcgggggtgcaactgtcaaggtatatctgacctagcagttcaggagcatgctccattttttgtttttttgggtttttgttgagacagagtcttgctctgttgcccaggctggagtgcagtggtgcaatcttggctcactgcaacctccgcctcccaggttcaagtgattatcatgcctcagcctcccaagtagctggaattacaggcacgtgccaccatgcccggccaatttttgtatttttagtagagatggggtttcaccatgttggccaggctggtcttgaactcctgaccccaagtgatccacccgcctcggcctcccaaagtgctgggattacaggtgtgagtcaccacaactggcctgggagtgtgctctgtaacttacctagatctatggcatgtaggcctcatttgtgctcttggccctgcccactggctttgggggtgggggcttactcagaaggcccccttcagggctcggggaggacacagctgcagaagagcctgcaggctcccaaactctgctggctggagtgggcccaagcatggccagaagctgggaagggagcaggaggctgcagggctctggagggaggctgtggggagatggactcctgccttttttcctgccttgtgtccaggggaggggccttgaggccagaggctgcccacagcctggtcctgtgggcgtgtgtcttttaattacagatgtagctccagcgacacttcactgcaaggcgtgtgggtggggatggaatgtcagaaggaaaacaggagacaagaaaacagagataggacgggccagaaatagtacaggccagggtgagatagcagcggccagtggtggtggagggagaggctggaggagggtctgtcgaaacctctccagagaatgcctgtcccaggctgcccctccttattcaccccaagccccgcaagttgaaactccaggaccggtggcatctagatcgggctccagagctggttcaccaactccctaagcaacaccctcctcctgagtggggaggggtagccgagcctttgcgacctgagtcacccgcttcctgctcctggtctgggcgactccatgcacaggctgacacagctggggccccacctgccctgccagcctgtcccgctcctccctctttccacaagccaggagagatgcctgccctgacaaggcatgcttcccacggagaggccatccctctcacgcgcacacacggctggaggcagccatttctccctgacctgtggagagccttgggaagaggaagaaggcatagtctaagcggagcccccttttccctgcatctatgaagaaactgcggctggagccaggagagggacttccccaagatcacacaagaaaattcctggcagggctgggacttgaaccttggtcttctgccagccagttcacctcccccaccaatgtaggtctctttccaccccaaggaaggcaaagacgggctgcagtcagggaggagacgagaaccaattttgccagcttgattttgtcagctcagaggtgtgaccccaggaaaaccttggagttagacagccagggctgggggagggggtggctctgggtggtcccagactcaggccttacttcccctaagccgaccagcggatggcaccacctagagcctctagccatcaattatgcaaacagacccttccccacccccgcctctcgccctccggccctctctgcttcccaggtctttaagcgctggactccacctggctgagaactgggacaggactcagcggcccctggccttgtactttcatcccatctttcccagtcccatcccacggcccccagggaatttgagagttgagatccttgaatatttcatcagcacttcagcctccagtggaagcagcagccaacttacatctcctggagcatttatggccccaacagagaacctggaagtagccagggggaggggtgggtgcatgggggagggtgaagcttgggccaggctgccaataagggttgatggagaagaaggctgccgggtccaaagtgtgtgtgagctgggggaaaggggctccaaagccgggaacatttccgtgtttgaggatacagatgtattttaaaataaataaacaaaatggagttatcaaaacaattatacgcaaggttaaagtcatatgacagggttttctgacttcagtcctgcccctgtctcgtgactgggtttataacctcatccggagataaggtaaaaaattttaatgggagcttttttttttttagggctgtgaggccctcaaatgaccccctactgcctggggccagggaggaaaggccaaattctccagctacattggctgaaacttgccccttcccagcctcctcctccaggaaggtcaggaggatttagcccagtagtcaaggaaaaataaagtaatttggcttagctaccccttattttaccccagaaacacaatatcacacttttcttctgaaaagaaaggtgaaaagggtgacctcaaatggaaaatgtcaagttctcttggcctcttctttgcacatgacctcacttagtaagttcttctggagagcgaaaggatcaaggctgagcgaggtggctcacgcctgtaatcccagcactttgtgaggccgaggtgggcagatcacctgaggtagagagctcgagactagcctgaccaacatggagaaaccttgtctctactaaaaatacaaaattagctgggcttggtggcgggcacctgtaatcccagctactcaggaggctgaggcaggagaatcgcttgaacccgagaggtggaggttgtggtgagccgagatcgcgccattgcactccagcctgggcaacaagagcgaaactctgtctccaaaaaaaaaaaaaaaagaaaagaaaagaaaaaagaaaggatcaagtgcagatgctcctcaacttcagaggggggttatgtcctcatagacattgtaagttgaaatgcaatatagggagcccccatctgtacaaaacgttaaaaaatgagctgagcatggtggcacatgcctgtagtctcacctgctcagaaggttcacttgagcctggaaggtgggggttgcagtaatccgagatcatgccactgcactctagcctgggcaacagttcgaaaccctatctccaaaaaaaaaaaaagaagattgtgagaggagacaaggggaaaaaattaaaattaaaaattaaaaaaaaagaagaaaatgtacttaatacacctaacctacatcatggcttagtttagcctacctcagatgggctcagaacacttcagcctacagtggggcaaaatcgcctaacatgaagcctattttatgagaacttgttgaatattttggccaggcacggtggctcatgcctgtaatcccagcactttgggagcccaaggcaggcggatcagttgaggtcaggaattcaagaccagcctgggcaacatggtgaaaccccgtctctactaaaaatacaaaaaattagcctggcatggtggtgcgcgcctgtaatcccagctactcaggaggctgaggctggagaattgcttgaacccgggaggcggaggttgcagtgagcggagattgcgccactgcactccagcctgggcaacaacagtgagactctgtctcaaaaaataaaaagaagaacttggtgactatctcatgtaatatactgaatactatactgaaagtgaaaaaatagcatggttgtttgggtgcttgaagtacagttgctactgaatgcttatcacttttataccatcctaaagtcaaaaaatcctaagttgaatcattgtaagctggggactgtctgtacagtatatgcatgtggagggaagggtaaacaaccttatcctccaagttatctgtttccccacctgagtcacaggcatgaggtattcccatcccaagggctgtttgcgggacagaagagatgctatccaggaacgttggcgccagctgggacccaggcaggcagtgattatgcagtggtgtgtccataggtcagacctggggtttgggatggggccggtaccagggggctgtccccagccctcagcacactcccatctaattcccaagtcatcttggaacttgtgaagggagctgggcagggctgcgccagcctagcttagagtgagcctcagccctgggggcccaacccagactctctgggcctctgtttccccatccacaaaatggaagccatctatctgccagggttgtccttagagacaagatacaagagaaggcctggagcaaggccccagaatggggaaactgtctaagagttgagtcctgtggctgccaggatctccccagtcatgttgagctattggctctagcaacaactggccacagccttctgacaaggggaagggccactctttgttcccaagggagtttctattctcctagagacagagaaccaggttgagacttcaagaactacttttcttttttctttttctttgtttcttttttgtttgtttgtttgtttgtttgtttgttttttgagacggagtcttgctctgtcacccaggctagagtgcagtggcgcaatctccgctcactgcaaactccgcctcccgggttcaagcaattctcctgcctcaacctccggagtagctggaactacaggcacccaccactatgcccggctaattttttgtacttttagtagagacgggtttcaccgtgttagccaggatggtctcgatctcctgaccttgtgatctgcccgcctcggcctcccaaagtgctgggattacaagcgagagccatcgcgcccgacctttttttttttttttttttttttttttattgtgacagagtctcgcagtggcacgatcctggctcactgcaacctccacttcccgggttcaagcgattctcctgcctcagcctcccaagtagctgggattacaggagcccaccaccacacccagctaattttttatattttgagtagagacagggtttcaccatgttgagcaggctggtctcaaactcctgacctcaggtgatccacctgcctcagcctcccaaagtgctggaattacagacatgagctgcgcctggcaagaactacttttcaaatctaagagtggaatttcttcggctggaatttactgaatttgcggggagcccaagggactccctcccacctccctgaacatgactctcaggattcaggaagttgttagtctaagtgatcccagcaactctgtccccaggcccccctgcctcccttcattcatttcttccttctgtcctccctcccttcatttcttctttctttgctcccttcctcctcctttcttcctttcatttttttccttccccctcccttcccactccttgcctccttcagcgagagctgagctatggcattgcaggggattttttttttttttgggggtactcactctgtcacccaggctccaggctgaagtccagtggcctgatcttggctcactgcaacctccgcctcccaggctcaagtgatcctcctacctcagcctcctgagtagctgggattacaggcatgttccaccacacccagctaattttcttttttttttttcttttgagacagagttttgctctcgttgcccaggccagagtgcaatggtgcgatctgggctcactgcaacctctacctcccaggttcaagagattttcctgcctcagcctcccaagtagctgggattacaggcatgtgccaccacacctggctaattttgtatttttagtagagacggggtttcaccatgttggccaggctggtctcgaactcctaatctcaggtgatctgcccgcttcggcctcccaaagtgttgggattacaggtgtgaaccaccatgcctggcctaatttttgtattttttggtagagacagggtttcaccatgttgaccaggctggtgtcgaaatcctgggctctactgatccacccaccttgcttggcctcctaaagtgcagggattacaggtgttagccacagcgcatggccctgtaggggatttatctccacatcctgcagcgcaccctctcctctccctgtccccagctgacagcctaacaaaaccaggctggccaggcagggtggctcactcctgtaatcccagcactttgggaagctgaggcaggcggatcgcgaggtcagtagatcaagaccatcctggccaacatggtgtgtctctactaaaaataaattagccaggcctagtggcatgtgcctgtaatcctagctacttgggaggctgaggcaggagaatcacttgaaccagggagttggaggttgcagtgagccgagatcacgccactgcactccagcctgggctggagtgagactacgtctcaaaaatgaacagacacacaccaggccagcccctgcaaccagggcattctctctcttctctgagcagcactgatttagttagaaaagatccaaacccagctcagtcaccaaccacctcaaggaaccctggacaaactgcttctcactcctcagccccacctggagcagaggggaactgacatgtacatctcaggactgttttgagggttatcaataatttgtcaagaggcctggtggtggctcattcctataatcccagcactttgggaggccaaggcaggaggatcacttgagcccaggagtttgagaccagcctaggcaacagagcaagaccctgtctctaccaaaaatcaaaaaaattagctgggtgtgctggcacgtgcctgtggtcactgctactccggaggctgaggtgggagtatggcttgagcctggaaggtggaggctgcagtgagccgtgattgtcactgcactccagcctgggtgacagagcaagatcctgtcgcaaaaaataagctcccaagtgcctggcacacagcaggcacttaggacatcatagtagctctgatttctttaggatggggtcttcccgcggcatctgagtctggtcctgctgcatgaggccagcctccccagagccctttcggtcatccctaacctcctacccattattccaagattctaggactggtgaggtgctgggtggggtgtgggggcgggtggggaggtggctacctgagacagaggtgtggaggaggtgaagctgtctggatgggtggagtcaggagaatgagctggagggccccagagggcccacactgggactggctgggagtaggtttcaccggtttgcagagctggctgggcaatggggagatgctggcatcaggggaggcgggaggggctggcggctccctgggaaaggagagctgagtaacgcaaggctgagccagtggcctgggctaaagggctgcacaggaatggtgcctagagagggtgggcctgctccctaatacatacactgcttcaccacacactcggagacgccactctcagatgcgcacttgcacagctaccaacacacctcaactgcaacccctcagctctcagatccttttcccacctccatatatgccatacctatctaattcatacattctgacatttattgttttctgcctgcctccctgctggaatgtaagcccatgtgggtccggcgtttggcctgatctgttcatttttctatgcccagcacctcagcatgcctggcacatggtaggtgctcaataaatatgtgctgattgagtgaatgaatccctctaaaaacacatttattcccagtactttggaaggccgaggtgggtggatcacctgaggtcaggagtttgagaccagcctggccaacatagtgaaaccccgtctctactaaaaatacaaaaactagccaggcggggtggctcacgcctataatctcagtactttgggaggccaaggcgagtggattgcctgaggtcaggagttcaagaccagcctggccaacatggcgaaaccccatctctactaaaaatataaaaattagccgggcacagtggcgcatgcctgtaatcccagctatttgggaggctgaggcaggagaattgcttgaatctgggaggcggaggttgcagtgagcgaggatatgccactgcactccagcctgggcaacagagtgagacactgtctcaaaacaaaaacaaaacaaaacagaacaaaaaaaaaccccaaaaaattagccaggtgtggtggcaggtgcctgtaatcccagctacttgggaggctgaggcagaaaacagcttgaacccaggaggcagaggttgtagtgagctgagatcacgctactgcactccagcctgggcgacagagcaagactctgtctcaaaaaaaaaaaaagaaaagaaaaaaaaaaaccacattcatgcatgcacgcaggcaggcacacattcacacccagacccgcacattcacgcaacacacaagcacacgggcactttcagacccacacccagccgtccagattccaaagcttgtgctcatggcaggttcacgtctgcgcagacacgccacagcacatcccgctccccaccctctgaagggccagcccctcccagaaacaggggctgggccttggtggacctgacaacactgcagcttgaaagaggtggggtggggcggggccaccctgcacctggaggcggtcaggaaacgctaccactgcagatgtgcttccccggaagacccacctatgggaggaaggagtgaggtcactgagcccccagccttgacccagccctttttccagactcagactctgccctttcagctctcatcccgatcaaaggcctaggggaggggcttggagtgggacagggagtcctcctaggaacagaggtggacagggcccaggccagatcacctggcacatctggagagaaagtaggggtggggcagtgagaacttggcttcccagccttgactctaccttcaagtgggaagacaactctgccgccctgcccccgggaggctggaaatatggggcagaactgtcacctggctggccttggccctgggttcctcccagacagaccccctttgcccccacctccctgctgtggaataggggtggggtttggcggtgagtcccaggctaggaggtagccaccaggcaccatcgttgcctgcacaccctgcacaccgggacccactgcccctgggagcccatgtaaaatcggtcaagagggatctggctgtcccactgcaccccaagaatcccaaagtaatcaaaccacatccctggggctcctctgcctgctaagctggggccccaacccggctctggaatgtgggaatagagggcagcggcagggccagctccctctgactctaaggaaactgggtcagtaaatgcccacaaagtaaacactaggagcaaatgtccttggccccctcccacacttgccacattccccgagggaagtgatcctgaactaggaaaatacaggacttcccatcttagaaatctgaaaccatcgtcttcccgcctggggaggactgtgttctcccgccccctggtggcagatctgcacactgcgtcctctctcacacatccttcagccccaggtgcagaggaccagccagggcccagatggtgcccctccgccccacattttacagatgaggggacacaggtgcggagagagggagggaaggacctgtacccttacaactgagctccagggagacgaccacgggtactatgactcattcaacaacaaacatttattgagcacctactggtcagggccctggaaccactagactcttagtccagtgctcttcaggaccctggaggaccctctgcaatttggcctgagactccagccagcagctggaaactccttgtccaggagactgtccaggtgaggagctcagcagtgaggagggcggaccccatcagcccacttgccaacctgcaatgccaccaccatcctgtggtccagagacatagaagtggcaggatgggtctggggtgcagcacccatgggtgaggcaggatgggggtccagtcagctgtgtccatcttaagtttttttttttttttttgagatggagtctcactctgtcgcccaggctggagtgcagtggcacgatctcggctcactgcaagctccgcctcctgggttcaggcgattctcctgcctcagctacgattacaggtgtgtgccaccatgcctggctaatttttgtattttttagtagagatggggtttcaccatgttggccaggctggtcttgaactcctgacctcaagtgatcggcctctcagtgctgggattacaggcgtgagccaccgtgccggcccgtcttgtttttttttaaagatggagtctcgctctgtcgcccaggctggagtgcggtggcgcaatctcagttcactgcaacctttgcctcccaggttcaagcgattctcctgcctcagcctcttgagtagctgggatttcaggcgcctgccaccacacccggctaatttatgtattttagtagagacggaggtctcatcatgttggccaggctggtcttgaactcctggcctcaagtgatccacccaccttggcctcccaaaatgctgggattacaggtgtgagccaccgcacctggcccatcttaagtttttaataaatagttcttgctgctgcccaggctggtgagggtggggccatcggcaccaggcttcccaagcttgagcggtgtggggtgtccccttctcatgcgagttcaggctctggctctgaaaaggaaaggagaaagcactggggttgctcccccacccactcccaatgggtgtccaggtgctgtcctgatgggaggtggggtgaggctcccccggacaggtctcagctggtcccagctccaggggagatgctgcaccaccacccccaagcgggacaggggttgccaacaggctggaggcccctggaggatgggccccagcacccacacacaccctgggctccggagcccagcgggtgaatgcatctgtccccaacctccatcccaggctgcatccccaccccccaaggactcgtgtcactgaccagcctcggcctcgtcacccttggcatccggctcctgccaccagtcagcatacatgccctcctcgtagtcaccctccccctcaaactcggcgtcagatagggcatcctcaggctccaggggcggttctgtctcctccagctccatctagagtagcgccacggttgtgggagaaaccgggtcacagtacgcccaaacccatatgggctcccttcctggccaatgggacttcccatcccatctctcggtccccaaagcccctccccctccccagtctcaagatctaatgagacagtcctgaggatttttcccaaactgcccctccctgagtggctgcatagggcaccaccagcagaatttggtgtcagcataaacatcgcccctgcacagccccaccttttaagcataaagaccctggcaagaatattgctagtccatgcataatatttgctcatactgtttccctgccaggaactactgctgtcccctgtgcctgcgtagcccgcactaatccctccaaagccaggcatcagttccaggctgagcccttgctggtgactctggctgggctggagacctcccctggtgccgtgtgctgccctctccagcagcagtttgtgcttcccccactagactgtgagcggcacgtgaaagggaccatgacttccttttttttttttttttttgagacggagtctgctctgttgcccaggctggagtgcagtggcatgatctcggctcactgcaagctctgcctcctgggttcacgccattctcctgcctcagcctccccagcagctgggaatataggcgcatgccgccactcctggctaattttttgcatttttagtagagaccgggtttcaccgtgttagccaggatggtctcaatcttctgacctcgtgatccgcccgccttggcctcccaaagtgctgggattacaggtgtgagccaccgtgccccgccaggaccatgactttcactaacttactccagcccctagtctggtgtctggcaaaccacaggaaataagagacagccgtcaaaatggctgccatacgccaggcgtggtggctcacacctgtaatcccagcactttgggaggctgaggtcggtggatcatttgaggtcaggagttcaagaccagcctggtcaacatggtgaaaccccatgtctctactaaaaatacaaaaattagctgggtatggtggcacacgcctgtaatcccagctactcaggaggctgaggcaggagaatcgcttgaacctgggaggcggaagttgcaatgagctgagactgcaccactgcactccagcctggatgacagagtgagactcggctgtcattcactgtgcacctaccaggtactggctctttatcaagtgctttacatacttgatctcagccaggagcggtggctcacgcctgtaaacctagcactttgggaggccgaggcaagcggaccacttgaggtcaggagtttgagaccagcctggccaacgtggtgaaaccctgtctctactacaaatacaaaataaaattggctggacatggtggcgcatgactgtaatcccagctactcggaggctgagacaggaggatctcttcaacccaagaggtggaggttgcagtgagcagagatcgcaccactgcactccagcctgggtgacagagtgagattctgtctccaagaaaaaaaaaagaaaaatgcatacttgaggccgggtgtggtggctcacacctgtaatcccagcactctgggaggccgaggtgggtggatcacaaggtcaggagatcgagaccatacggggtaacatagtgaaaccccatctctactaaatatacaaaaaaaattagccgggcgtggtggcaggcgcctgtggtcccagctacttgggaggctgaggtaggagaatggcgtgagaacctgggaggcggagcttgcagtgagctgagatcacgccactgcactccagcatgggcgacagagcgagactctgtctcaaaaacaaacaaacaaaaaaacatacttgatctcacttaattctttctcttttttcgagacagagtctcaatctgtcacccaggctggagtacagtggcgcgatctcggctcactgcaacctctgcctctggttcaagccattctcctgcctcagcctccccagtagctgggattacaggtgcccaccaccacacctgagtaatttttgtatttttaatagagacagggtttcactatgttggccaggctcgtcttgaactcctgatctcaggtgatccctctgcctcggcctcccaaattgctgggattacaggcatgagctaccatacccggccagatcttgtgttattctcaccacaacaatgtgagatgggcatgattctccccattcaatggatgaagaaacagaagcttgagaggttgcctgacacttgtttggaggccacccaactggtaagtaatggagccaggtctggctagttcctcatcctgggtgctgacggtgtagattctgccctcctcctctggggttggatgggtgggggcgtgggggcatgaacaaaggagaggatacataaatgagcactgagcagcaacacctcagagaaattaaggctgtcaaaccctcacttgaaatcaatgttaatagggccgggtgcggctgctcacgcctgtaatcccagcactttgggagaccgaggcagatagatcatgaggtcacgaggtcgagaccagcctgaccaacacggtgaaacactgtctctactaaaaatacaaaaattagccaggcgtggtggtgcacgcctgtaatcccagctactccggaggctgaggcaggagcatcgtgtgaacccgggaggcagaggtttcagtgagctgagatgacaccactgcactccagcctgggcggcagagcgagactccatctcaaaaaaaaaaaataaataaataaataaaataaatcaatgtaatacaatacggtccttctgtcctgaggtcctgcattcattcattcactggttcattcaaactcagtttctgagcccaggctctgtgcaggatgtgggagaacagggaataatgtggccctgtgtcctgcagtgcggttctcctggatactggctggagaaggggcccagggctgagatggacgagggctgcaatcacccaggtccaggccacaggtggccagggaggcacacaggtcagagtgggcactgctagcccagaacaaagagccagggcatgcagcaagggcttcctggaggaggcaccatgtgagctgggcctgggaggaacaggattgagacatgtacaaaaggaggacatgagaatactaaggctggggaaggaacggacagtctagacaaggaacaggcaaacctctcttcttcacgacagctgaccaccaggggctggggctgaattctggcacactggtggccccaggaaaaggtccaaggtgtccccatcacagcccaatcctggaaagcaggaggcactcacctcatcatctgactgcaggtacatgtgggtgaactccagcagctcccgcagctcggcggtctggttgtggtagagcatggcctcctggaaggagggaaggacggggtggggggtgagccataccctgttgccagatggcaagaagccagggctcctaggatctgggcccactggccctcttctagctcaaggatcagagaataggtatcagctcacaagctcatcagatcatcgtggctgcttggaacactgggttaaggattctgagagtttggtgacaaagagtccctcaatcgattagcaatgtctgccactgacaaggaaggcaggagtggcaccatgtgccccatatttgccagcctggccctcaactccaacagatttcctccattggttacctagggtgttcctgggaaagagggacaaaggtcagcagtgagggtaatgaaggtagggaggggagcaggtaggagtggatgtgtaccttcatacctccctcgtctggacactgctggtgaggtggcagtatcactgccattttgcaggtgaggcaatagattaggaaagggccatggtcttcccaggaccacacagcagtggggctgggctctgaagccaggactctaacctcaactcatattctttctttccatttcccatcctgccttccatggaagccaggagtttattttttattatttatttatttatttttcttttgagacggagtctcgctctgtcacccagactggagtgcagtggcgcgatctccgctcactgcaagctctgcctcccaggttcacgccattctcctgcctcagcttcccgagtagttggtactacaggcgtccaccaccatgcctggctaatttttttttcttttcagtagagacggggtttcaccgtgttagccaggatggtcctgatctcctgacctcgtgatccacccgcctcagcctcccaaagtgctgggattacaggcatgagccaccgcgcccggccgccaggagttcattttttacaaagtgcatatccagcaagtgccccagaaagcagtgcccacctcccggggctggaagtcctcctcttccaggccccagcgagcccggtggaaccggtaatacaccaggttctgctgcatgacgctgtccttggggtcgaagagcatgtagctggcggcgctgcgggcagcctggcgcacatcattcactgcagcaggacaggggtgaggaattgctctggcacttccccttcagagtcaactccatcttccagttcagtccagcacccctgctacccagccacctcccagaatacctaatgggctccttatcccacccaagcataatgccagctagcatgtagtgggcacttaccctatgccaggccctgactaactcatctaagcctcactgttattgtctttttattgtttttgaaacagggtctcactctatcaccctggctagagtgcagtggtgcaattatggtcacctcaagcttgatctcccaggcttaggtgatcctctcacctcagcctcctgagtagctgggattacaagcaggcaccaccacacccatctaattttttgtatgtttttgtttgttttgagacagggtcttgttctgtcacccaggttggagtgcagtggtgtgatctcggctcactacagcctctgcctcctgggctcaagcaatcctcccacctcagtctccccagtagctgggactacaggcacgcgccaccatgcctggctaactttttgtattttttgtagacacggggtcttgtcatgttgcccaggttggtctcgaactcctgggctcaagccatctgcctgcctgggcctcccaaagtgctgggattacaagtgtgaaccactgtgcccagccatgcctacctattactgtcatccccattttacagtcaagaaatctgagtcacagagaggttagataaattgctcaagctcacacagctggagaatgatggctctagtgaattagaggcccttagcctctctgctatgtgtacccaggaagggtctcctggcccctgggttctcagcccctctgctctgactcctggctctgtctgaatcttggcatctccgagctgcaggaacactggaggctgtccattccagccccagtggatgccaggatctctccagtgaggagagccacaagtcctggtgccactttttattagtcataagaccaacagccccttgccctataagcctcagtttccccatctgaaaaatcggtccagtaatgccagctgcatggtgttggtgaaaggaccacataagataaagtgacttataaactctcaagtgttggccggtcatggtggctcatgcctataatcccagcactttgggaggctgaggcagtggatcacctgaggtcaggagttcaagaccagcctggccaacatggtgaaaccccgtctctactaaaaatacaaaaactagctgggtgtggtggcaggcacctataatcccagctactcaggaggctaagagaatcacttgaatccgggaggcagcggttgcagtgagccgagatcgtgcccctgcactctagcctgggcaagagtgaaactccgtttcaaaaataaaaataaactgtcaagtgctctgcagttgttggttgtctagtcatttgcccaaaagaccctcttcttctccctgaggctgctgtctgttctcactcagaagcctctcacctgccccagactcccagggtgccttccccatattcccaccacccctagactttcctcctatcacccagggtcctcaatactgaaggaaagctccccacaactctgggaggctcccatacagtcctctcccttatcacctcgtcccctgcccaagccagcccacccagggggctcacacttatagtaggcaaactgcaggtagtggtacatggtggccacgaacttgtccacgaagtagccacccacattgggggtcaaattggcctcacagtccaccttgcactgcagggactctgcaaagagatctgagggtgggaggcagcagtgagaggctggcattgcaatgaacatctccgtccccccagtggagaagactctaaatccaatctctgcctactaagccaagctgcttgtccagaaaatgtgttgctgttgcaatcacaggagagaatgtctgtaaagtgcttggcatactatatgacaagtgatggtgaggaagatgactgtgggctgggctgactcaccacccctgccactcaaccaccaccccaagccagagggagccagggcattctgggagagcagcaggtgaggtccagaaatggggcagaagtccaaacagagaagctaaaggacagtcttttttttttttttttttttttgagacagagtctcgccctgtcgaccaggctggagtgcagtggcgcgatctgggctcaatgcaacctccgcctcccaggttcaagcgattctcctgcctcagcctcccgagtagctgggattacaggtgcccgccaccacgaccagctaatttttgtactttcagtagagacggggtttcaccatgttggtcaggctggtcttgaactcctgacctcgtgatctgcctgcctcggcctcccagagtgctgagattacaggtgtgagccaccacacctggccaagtacagtcctttctgcccctgctcgagggaccccagggttagagatcccaagactaggtgtaatttctggttatcaactgctttctgcacacatctgctgggttacttctcaccgctgcacctttgcatctgcactgccctctgcctggaaggcctatgaacccaagcttcccaaaccctttagggatgtcactgcctctactcactgatccagccccttggacactcccagctggggcccctgcacccagcgtctttctcaacagacaaggccttcctcccggctggctcctccgcattcgcagtgctccacgtgcatgaaggggacatctgccttaccgggccctgtgggtgagaggaccgcccaccgtggtctgggtggcagatacctgctatggccgggtagaagtccttgaagtccacctgctcatgggccccttcacagccggccaggcaccgggcaaagactgccaggtactctgacaaggcccgctccatgtcctccgtgctgctgcggaaatccccgctgttgtagagcttcacagcccggaggaacacggcctggaaggggcgtggcagggggagtcagggcgcccccaacatctcccctcctctactagccctcctctacaagcctcctcctgaccctccaccccacctcgtagggctgggcctctaggtccgtgagggactcgtcggcgacgtccagcatcccctgatagtagttgagatacttggcggtcagctcgtgcttcgggttcctctggaggaaggtgtaggccgccgccaccgccttctccagccggttagcctggtcggggggtagggggtgggggagcgggtcagcaagaccggagctcgcggccccgagcgcacggcgggcttcgtgccttgggtgaagataacgctccttcgaccgatctgtggggagccacgacgcccagcccgagacaggtccccgggtgggggcgggctcccaccttgaacagcgcgtagtgcaggtactggtagggcaggcggctctggaagtcacgcagcagctgccgcggcgggtagggcacctggaaggcgggcagcgtccgcttgcagcgccgcaggcaggcggctcgctccaggacgcggccgaagagccgcagctcgcaggcccactcgtctgcgcggccgccgtcgggatcgggcttggccgcgggcgcggggccgctgcagttggcgtggcagaaggcctcgctgtcgcgcaggagccggtgcagccgcagcgccgcctccaggtagcgcgcgctctcgcgccagctctctccctcgtactgctccagagcgtgcccgtacgccgcggccagcggcatcaggtcctcgggcgggaagccccggaagctgtacttctcgtactgcgccccggcgctgcccagcagcaaccacagcagcccccacgccacccgagccatgcccgccgcgccgccggctctccggagctgagctggctgccccgcggacggaaggggacagggccgggccccgggcgggcggcgcgcccgctgggtcttagcgccgggcacgaggcggcaaggtggggcggggcctgggtcacgacgtctcccctcttttcccagagggtccgatagtgtcgttaagtcctctccgtcggcccgggctcctgccttgggggtgtcccctaggtagagaatgcgtcggggagcgcttcccgccagagatgggaagcccaggaagcccctccccatgcaaacagtgcccccgcctgagatcaggacactgagtgagggccgcctcctctgcgctgcccatacgagaaggaagccctggagccgggccttccgtcgctgcgccctcctgcaccctccgagtgtctcccccgcccacgtcggaggcacacacctgctgtcacctgcacaccttgcgctgccaccaccccccactccatctccgtgcccgtcacatcccaagtcacaaagtccttctttcagtccagcttttgcgggaccaagctgctcttccctggagatgccttcccttggagtacagctggggtcacggatgagcacggagatgcctctcacactccgcggcttcaccacccacctggaggggactagaattcgaagtgcccgcgaaagaagcaaggttcatctccgcccggctttaggacccgggggctccggaaaaagtcattgaacttttttttttttttttcctttggtgtccactcagagttctcatctttcccgagcctctctccctggccaggccccaggtctcgcagccagggatggagatggggggagggggaacctagagttctttgtagtgcctccctcagactctaacacactcagcctggccccctcctcctattgcaaccccctcccccgctcctcccggccaggccagctcagtcttcccagcccccattccacgtggaccagccagggcgggggtagggaaagaggacaggaagagggggagccagttctgggaggcggggggaaggaggttggtggcgactccctcgctcgccctcactgccggcggtcccaactccaggcaccatgttccccgcgggcccccccagccacagcctcctccggctccccctgctgcagttgctgctactggtggtgcaggccgtggggagggggctgggccgcgccagcccggccgggggccccctggaagatgtggtcatcgagaggtaccacatccccagggcctgtccccgggaagtgcagatgggggattttgtgcgctaccactacaacggcacttttgaagatggcaagaagtttgattcaaggtaaccccggttgggcgcccccggattcaccactccgtcccctgaacccggggtcctgtttccttgttgcctcttttaagctctgcatcccaatactctaaccctagacagcacccctggggcctcccagacacccatctccccaaagataccctcctgcccccacttccaaaccctcacttctcaaaggatcccatttctttctcacaagctctccacatcccggaaaggactcgataatcaaggtgaactgccttgtgtagttaccagggctgtatgtaatgacctgatggagaggggtgttctgatctacagtgttggggggaagggggtggtccctgctgcttaagaaccctgggatggtctatcagcctggaccccgtacctttccacccaccctgactccccttctggttccactgttttcagtgcctttgtggtcagagaagagggaatagaacttttttttggagggggtgggagttttcagcggctggtgggcagggaaaaaggctggtgggtattataagaagacagccggctggacctgggggtagcgcgtggctccctgcggaggccctgtctacgtgtcacacagtcggacatgccaccctgggctccttggaggaatttcattcctccctctctggttctcctggaaccctcatctctctccattttaggtacaccaggccagaggcacaggccgcccatttttgccagccttggggtttgtaaggtggcctcctggtctgacccaggcctttggtctgccccagcaagtccacttttgttagcggggacagggcagggctgtatgccagcctcaggggtaaatctagggtcccagttacacacagaccccacagcacactgaaagaagtcagtgtttcttagaccctcctctgaaacacacaactcagcccacaggaaattagtggccatgactttagaggcaggcatatattggggtaagcctacaaactccaagagtcccaagaccctggttcaaatccaggctatgaccatggacagagaattttgtctctttaggcatcactttccttatctgaaaagtggagacaaaaacaggacctacttgctaaggctgatgttaggactccaaggacatggatgaatgaacgtaggcttctcacagggcctggcagtcctccagccagttcagcacacattaacattgaccctgaggaaaaccatatgacctgatgctgtggaacttgtagaaacttaatgcagagcttaagccttcataacaacactgagaaggaaacagtccagacttaaaacctgtctgcttggtgggcaaattcagatatagggtagtagccagaagtgcagccctgagcccttgactgctaggagtgaggcaggggttgggatttaggggatgtcatccctgatggggactctgggagcccagctcatgagtgttgagcttggaaaactttttgttttttagctggaggctcactctgtcgcccaggctggagtgcagtggtgccatctcagctcactgcaacctcctgggttcaagcaattctcctgcttcagcctcccaagtagctgtgattacaggcgcatgccaccacgcccagctaatttttgtttgtttgtttgtttttgttttttgagacacagtctcacactgttgcctgggctggagtgcaatggagcaatctcaactcactgcaacctccgcctctgcctcccaggttcacgtgattctcctgcctcagcctcccgagtagctgggattacaggtgcacaccaccacacccggctaatttttttgtatttttagtagagaggggtttcactatgttggccagactggtcttgaaaaaggcgggtgggtattataagaagacagccagctggacctgggggtagggcatggctccctgcggaggccctgtctgtctacgtgtcacacagtcagacatgccaccccagcctcgtgatccgcccacctcggcctcccaaagtgctgggattacaggcgtaagccacggcgcccagccttaatttttcatattttagtagagatggcgtttcaccatgttgctcaggctggtcacaaacttctgagctcaggcaatccaccctcctcagcctcccaaagtgctagaattacaggcgtgagcccccgcgcccacacaacttagaaaactttttttttttttgagacagagtcttgctctgtcccccaggctggagtgcagtagcgcgatctctgctcactgcaagctccgcctcctgggttcacaccattctcctgcctcagcctcccgattagctgggactacaggcgcctccacaattttttttgtatttttagtagagacggggtttcaccatgttagccagggtggtctccatctcctgacctcatgatctgcccgcctcggcctcccaaagtgctgggattacaggcgtgagccactgcgctcggccagaaaactttcttaacccatggccccttcaattaaaaaaaaaaaaatctcccatcctcactttacttctgaaaacttaaaataaattaaaagtgtatataattggctgggcacagtggctcactcctgtaatcccagcactttgggaggcccaggcaggcagatcacttgaggccaagagtgaccagcctgggcaacatggcgaaagccctctctactaaaaatacaaaaattagccagatatggtggtgcatgcctgtgatcccagctgctacttcggaggctgaggcaggagaatcgcttaaacccgggaggtggaggttgcagtgagctgattgcaccactgcactccagcctgggtgacagagccgagactccatctccaaaaatacatatgtataagtaaaaataaatacattaattaaaagtgtataactaaaaacaaacaaaagccatggcacttttagaataggcttttttttttttttttttttttgagagggagtctcactctgtcgccaggctggagtccagtggcacgatttcggctcattgcaacctccgcctcccgggttcacgccattctcctgcctcagcctcctgagtaactgggactacaggcgcccgccaccacacctggctaatgttttgtatttttagtaaagacggggtttcactgtgttagccaggattgtagaataggccttttcaaaatgtgaaaccagctcccaccccacctctgctctcccgtcttttcttggagagccaatagtataatggcaaattttagaactcagctgactacatattagctgtgtgaccttgggcaaggcactgagtctctcaagtctccattgctctcattaagaaaaatgagaacaagaatgcccacctcacaggggagacaaagaagatacggaatgtaaaatgccaagcatttaatcccatatagtaatgctcctctgcccctccgtgctgtacgtaccactccccacttgctgtcagcaaatagtagcagccatcaggcccgggcatcccacccaaccccgtcccagggcaatagcagcccttgtcctcctcagggacttgcctttcacaacagtccgttctcttaaggtgggcgtcacggccgacctaggagggggacttgaaaaggaggtgagaagtgtgtgtgcgtatccacacctggctatagggaggggggattgtgtgcgtgtgtgcaggcacacctgtgcatctgtgccaccatgggcagtgtgtgtgtgtctgaggtcactgtatcccatctgtccctccccccccagctatgatcgcaacaccttggtggccatcgtggtgggtgtggggcgcctcatcactggcatggaccgaggcctcatgggcatgtgtgtcaacgagcggcgacgcctcattgtgcctccccacctgggctatgggagcatcggcctgggtgagaagggctggggcacaggccgggggtggaggagaccacgaggcagaatcagggatcctggggtgagaaaactgaagtgcggagatgaggagtgacttgcccaatgtcacactgtgcacgcagtatgaagagtggcagctctggctggggcagtagctgacatatatggtcccagagttttgggaggccgaggtgggaggattgcttgaacccaggagttccagaccagcctaggcaacatagtgagacctcgtctctacaaaaaataaaataaattatccaggtgtggtggtgtgtgcctgtagtcccaactactcagaaggctcaggtgggaggattgcttgaccccgggaggctgcagtgagccatgatcatgccactgaattccaccctgtgtgacagagcaaaacccctctttttttctttttctttttttttttgagacagcatctcactctgttgcacaggctggagtttagtggtgcgatctcggctcactgcaacctcagcctcctgggctcaagcagtcctccctctcagcctcccaaatagctgggactacaggtgcacaccaccacacgtggctaattttttgtatttttagtagagatggggtttcgccatgttgcgcaggctggtcttgaactcctgggctcaagccatccacctgccttggcctcccacagtgctgggataacaggcatgagccactgtgtctggccccctatctcttaaaaaaaaaaaacaaaaatagtggcatctctgtccctggtttgggtctcttggtgctgggatgagaggaaggggaataacagggccctggctgggatcgtggttggcagagcagaactctgagacctccacgctgctgcgctctcacagcggggctcattccaccggatgccaccctctacttcgatgtggttctgctggatgtgtggaacaaggaagacaccgtgcaggtgagcacattgctgcgcccgccccactgcccccgcatggtccaggacggcgactttgtccgctaccactacaatggcaccctgctggacggcacctccttcgacaccaggtgaggggctggaggggagccctgaggcactggggactgtggcatggggagcgggaatccggggcccagcctgcctctcccacctccacctcattttctgcagctacagtaagggcggcacttatgacacctacgtcggctctggttggctgatcaagggcatggaccaggggctgctgggcatgtgtcctggagagagaaggaagattatcatccctccattcctggcctatggcgagaaaggctatggtgagggtgggcaaggacacaaggggaaattccgcagaagagggaaaaaccaggcctccacatacagttgctcaggttgtatactgcacgagggcatccaaccaaggactcaaggtgggatgaaatctacccttggtgctactaagaaggggtgctttggccgggcgtggtggctcacgcttgtaatcccagcactttgggaagccaaggcgggaggatcacgaggtcaggagatcgagaccacggtgaaaccccgtctctactaaaaatacaaaaaaattagccgggcgtggtgggggcgcctgtagtcccagctactcggagaggctgaggcaggaaaatgacgtgaacccgggaggcggagcttgcagtgagccgagatcgcgccactgcactccagcctgggtgacagagcgagactctgtctcaaaaaaaaaaaaaaaaaaagaaggggtgctttattctgattcacacgaaggctcagtatgagccggtggtggccctggggaaaacccagctcaggtcttactggaggagcaagaagcagggctgctgatgggcgggaaagggctctggagagtggggctagtgtcttgcatggtgcccactgggccttcctgagtcaagaaggagcctcggcttgctccccaattttatggttcaagccctatcccttccccagggacagtgatccccccacaggcctcgctggtctttcacgtcctcctgattgacgtgcacaacccgaaggacgctgtccagctagagacgctggagctcccccccggctgtgtccgcagagccggggccggggacttcatgcgctaccactacaatggctccttgatggacggcaccctcttcgattccaggtcaggagggtcttgaggtgggagggcgggggctgggtgaaacgtggacgaagctgggggtcactctgagctgcctggaaggggagggcccctttgactcccttcctggccctcccgccttgtattgcagctactcccgcaaccacacctacaatacctatatcgggcagggttacatcatccccgggatggaccaggggctgcagggtgcctgcatgggggaacgccggagaattaccatccccccgcacctcgcctatggggagaatggaactggtaggggcgttccccagccaccacctcagctcctcctccgaactgcccattgtgtctaggccaccccctcccacagtgggattccaggcaccgctcggcccctctcatcacaaaaacatgcatgcagcttacatctggtcaccccatctgattcctgccacacagactccatcggtttcctccagggcagcgccccacttcgccccttccgcagtggagaagggcagccaagtttggggagggagggtggttatggaaaaacagaaccagcatacccccaggacccagctgtgctgggagcctcagtgtcctcacctgtcaagtgggcaagccatgctgatccgcagggtaagttactgggagtttgcaagacggtgagtggaaaagggctttcttactggaaagctgccttcccctgccccctgccccagtgaaagtttgttagaattgactctggacaaacatcccgtcccatcctcctttggatcctcagggtcgggaaggggtatcaggtctggggacctccatggagagacctcaagtagcctctcctagtgctctgagctgaccacactcccccattctggcctcaggagacaagatccctggctctgccgtgctaatcttcaacgtccatgtcattgacttccacaaccctgcggatgtggtggaaatcaggacactgtcccggccatctgagacctgcaatgagaccaccaagcttggggactttgttcgataccattacaactgttctttgctggacggcacccagctgttcacctcgtgggtccgggggggggccgggactgggcaggtgggtgggcacaggcatggggagtcctcctcagtgcacccccgacgcctgctcctccctcttggtcctcgagcgccaggggagcattcaacctcttgctgctttctgtaagtccccatctcggagcatgtcgaggagatgaaattctctgcttcgcaggggaagggaaggtgaagccaacagttgggggagaactgctctttctatttcacagaggggaaactgacgcagggagccatgagccctcgaggccacactttagggggcagaggcaagatgagaagggaaccccacgtctgcacagctgggcccctgcactctgctgcgtggcccaagtcaccagtgggagtaactccggaactgagggcttgttctgggcccacctcagagggagaggggtgtgcgctggcaggggacagggtggctgctgacctgggcatctgctctcccccaggcatgactacggggccccccaggaggcgactctcggggccaacaaggtgatcgaaggcctggacacgggcctgcagggcatgtgtgtgggagagaggcggcagctcatcgtgcccccgcacctggcccacggggagagtggaggtgaggggctgagaccataatctttttttttttttttttttttttttttttgagatggagtctgactctgtcacccaggctggagtgcagtggtgtgctctcagctcactgcaacctccacttcccaggttcaagtgattctcctgcctcagcctcccgagtagctgggattacaggcacctgccaccgtgcccagctaatttttgtatttttagtagagacagggttttgccatgttggtcaggctggtcttgaactcctgacctcaggtgatccacccgccttggcctcccaaagtgctgggattataatcatgagccactgcgctcggcccgagaccgtaatctgactggcatctgtcccttttgctcctgcccactgtgggtctgatgactggtgggaggagtcaggaatgccttcaggatggctccttaaacatcccatgccccactctccagcccagccccaggaggggaaactggcctgtgggctgggaaacagtgaagccaggcccagaccccggcctgactaggacccctcccttctctcctgccctccctccagcccggggagtcccaggcagtgctgtgctgctgtttgaggtggagctggtgtcccgggaggatgggctgcccacaggctacctgtttgtgtggcacaaggaccctcctgccaacctgtttgaagacatggacctcaacaaggatggcgaggtccctccggaggaggtgggtgaaggttcagtcctaatagccatgcccacgcaatccccgcacccaggaagcatcgaggaagaagacgtcccccgtccggactgcccacccgccctggtgctcctgcctgcgctgagtcccacgcctcaggctccttgtccctgctttttcctgggcacacatgcaggctgttccctacctgagaccagtcacagactatccccatgccacgcctccaccccagcccccaccaggaccccagcaccagtgcctttcccagcccttcctgagttacagggtgcgggggagcctgggaaaaaagaagaaaaagaaagcactcactggcctccacccggggcccctgcccctcccaaggccatgaccctcactgcccgctcccccggctctcccctgccccagttctccaccttcatcaaggctcaagtgagtgagggcaaaggacgcctcatgcctgggcaggaccctgagaaaaccataggagacatgttccagaaccaggaccgcaaccaggacggcaagatcacagtcgacgagctcaagctgaagtcagatgaggacgaggagcgggtccacgaggagctctgaggggcagggagcctggccaggcctgagacacagaggcccactgcgagggggacagtggcggtgggactgacctgctgacagtcaccctccctctgctgggatgaggtccaggagccaactaaaacaatggcagaggagacatctctggtgttcccaccaccctagatgaaaatccacagcacagacctctaccgtgtttctcttccatccctaaaccacttccttaaaatgtttggatttgcaaagccaatttggggcctgtggagcctggggttggatagggccatggctggtcccccaccatacctcccctccacatcactgacacagctgagcttgttatccatctccccaaactttctctttctttgtacttcttgtcatccccactcccagccccttttcctctatgtgacagctccctaggacccctctgccttcctccccaatcctgactggctcctagggaaggggaaggctcctggagggcagccctacctctcccatgccctttgccctcctccctcgcctccagtggaggctgagctgaccctgggctgctggaggccagactgggctgtagttagcttttcatccctaaagaaggctcctttccctaaggaaccatagaagagaggaagaaaacaaagggcatgtgtgagggaagctgcttgggtgggtgttagggctatgaaatcttggatttggggctgaggggtgggagggagggcagagctctgcacactcaaaggctaaactggtgtcagtccttttttcctttgttccaaataaaagattaaaccaatggccttagggtgtcttttggaccaggttgaggggcaggggggaatggctaggggatgaagtggggattgtgggaggcctttagacccagagattggggaaaaagttaaaccaggctgtttccatggcctcattagctccagacagcatgtccccaggtcaggggctccccatctggaggtttcctgcctgccctgggcctaacctggggtcttcgctgtgggaagggagccctgctctgtggagggggtgaatgtgtaaagaggggaggcctccagcagggtgtggagagatgatcctcatcctccaattgtccccattgaatgggaaagacaaggtccctgacctcaaacacaacctacaaagttcaaggattaaaccacacaagtcagattatcctttcccatagatcatttccaatactatgatattcccatctctccctgctcctggccaccacctgttaccacctgcccacccttctccctcttgctaggggaaaggtaatggagttcagatctccacagtgtcttgcaggaggacttcagccaccaaccaggccatctgtcctcgcttgcctggtatgacccgagcattgtgaggacggggtggtgacttaggaaagaaaatgacaggactggactcatacagcaaactgcccccatcagcacttcttgcccagggtcccctaagagacgtgactgctccccacgggcaatgaccgacattctctggccccgaagcatccagaaagctccctgattgaagtctttttttttttttttttgagacagggtctcgctctgtcaccacagcgcagtggtatgatctcagctcactgcaacctccgcctgccaggttcaagtgattctcctgcttcagcctcctgagtagctgggattacaggcacgggccaccaagcccggctaatttttgtatttttagtagagacagggtcttaccatgttggccacactagtctcaaactcttgacctcaagtgatctgccaccctggcctcccagagtgctgggattacaggcgtgagccactgcgccggccaagaaagctccttgattaaagtctggaagtggttactaacccagcctcagatggtggccactccctcctcccaaaaacgaatggaacaggcctgaagcagagaaatgcagcaaaacgcatgggctttggtcagaaacattcaaatcctggctccagctcctagctatggagtttgggcaagttacccatcctgcctgagccatctggaagcaggaggagctgcacctacttgtggggtcattgtgagggtcaactggcaggcacccaagtgcccagagtggcacctgggacaccgcaggccttcagtaacatctgtattacctcccgcttcacatctgcagaataacagaactttccaacggctagccgaacactgcaggaagggtgctggtgatttcctctaaggctaagaaaatgctgaactggctcttcagggtcggcccaataacgcaagaccacagtgcacacatcacttgtttcaccttggcacagtctccctcaggtccctgctctaaattccccttttcaggtcatccactttagtggccccgacccataagaggaggggaaaggagagcctagggcatagggggacagccacacacgaatgcatcccctcagggatccctaaagagggggctctcagacagggttgcctcaaccccaccgatcccaaatgaatttcaagtttgatggctgaatcagaataaagtcaaaccactataggctagaacataccctttcagccccacgctgaaccagacagacacaatcaggctgtgctcggatggggtctcaggccaatttgtggtggttctcaaactgtgttcctagaagcatcccatgtgcccccagggccaagaggtccaggttctacccccacccacatcccctgaatcagagcagcttttttttcattttaaaaattttgatctgtttcacacattatatttgtttgaacttcccatgtttaaaaattttgaagaaaatccctggagtagacaatccctagagcactgacatgctgtggtccaaggttcaccaggaacagtgcctgtgccctgccacatggcggggttccttcaagcctctggtgatgaaggtgctcagggaaaggaggacggaggggcgcggaaggacccagccactgctggccaccctggcctctgctctgtgttcacgggggagcagactctggggaggcgcccctcctcaccacggcctgcaggccgggctggagcctgcgccttcaggggccttgcatctccagctggaccccctggcacaggatgtgctgcagtagcccgttgaccacatccagagtctcgtccttctccagcacgatgtcataggagtccatgtagcgctcccgccgctcctccacctgcccggaatgagaggcagaagccagagggtccccaaatgccctgccctccgtagctcactctcaaagcccctggggctggggaggagagcattcaagcagcaactcccagctcccttttgagagccaaaggagttcaaggttaccgggcctaccctttggagacagacgagggatgggcatgggctaccacaattaacccttgggtcaatacaaaagaacagtaacaaggaataaaaacaaaaaaccagatgttgccactttgggaggctgaggcagaaggatcatctgagcccaagagtttgagaccagcccaggcaacatggcaaaagcccatctctacaaaaattggccgggcatgggggtgggtgcctgtagtcccagctactcgggagactgaggcagaaaggatcacttgagcccaggaaattaaggctacagtgagccaagactgagccatgacactccagcctaggtgacagagtgaggccctgtctcaaaaaaaaaaaaaaaaaaaaaaaaacagatgttgcctctaatccatctggactgaatttctttctttctttctttctttcttttttgagataggatctcactctgctgcgtaggctgaagtgcagtggcataatcttggctcactgcagcttcaacctcctggactcaagtgatcttcctgcctcagcctcctgagtaactagaactacaggcatgctaaccacacccagctaattgttgttgctgttgttgagacagggtctcactatgttgcccaggctggtcttaaactcctggcctcaagtgatccccctgccctggcctcccaaaataggggggttacaggcatgagccaccgcacctgaccacgacccatttttttttttgagatggagcctcgctctgtcacccagactggagtgcagtggcgcaatctcagctcacccaggagatggaggttgcagggagccgagatcgtgccactgcactccactaggggacagagtgagattccatctcaaaataaataaataaaataaaataaattttatttattttatttaggctgggcgtggtggatcatgcctataatcccagcacttcgggagactgaggcaggcagatcacctgaggtcgggagttcgagaccagcgtgaccaacgtggagaaaccccgtctctactaaaaatacaaaatgaaccaggtgtggtggcacatgcctgtagtcccagctactcagctgcctgaggcagaagaatcacttgaacctgggaggtggaagttgcagtaagccaagatggcgccactgcactgtagcctgcggaacagagtgagactctatctcaaaaaaaaaaaaaaaaagaaaaaaaagctgggtgcagtggctcatgcctgtaatcccagcacttttggaggccaaggcaggcggatcacgaggtcaggagattgagaccatcctggctaacatggtgaaaccccgtctctactaaaaatacaaaaaatcagccgggagtggtggcgggtgcctgtagtcccagctacttgggagccagaggctcccgtgaacccaggaggcggagcttgcaatgagctgagatcatgccactgcactccagcctgggcgacagagtgagaccccgtctcaaaaaaaaataaaataaaataaaataaaaatagaaataaaaaaagagaatgtgttcaaaggcatttgttaatgggcattcaaagagaagaaagacatgaagagaagcagccctggtcctctacccaccttgtcattcaggaagccaattttgagaatgttctgcacaccaggaaccccatcggccatggtgaggtccccgatagagtctcccagcaggatgacattggttttgccctcaagttgctggaagtaaccagagttctcacacgcagagctgttcttgttgtatgtgtgtatgagctggcccttaaatccctggagaaaaccctaaataatgaagacaagagacagatggaagggctgcagggacccatgtggcaccagctctccactgtctctgtcacagagaaaagggaatcccaaaagtgatagataatgccaaaacttcactgtagcctaaactacggcccatgggccagacttggcctgcttttgtaaataaagttgtattgggatacagccaaactcatttgtttacatgatgcctatggctgcttttttgtgctataaaggcaaagttgggcagttgcaacagtgatgccacagcccataaagcctaaatatcgacgacagggccttttacagcataagtttgtaactcctagtttaaatgaacaggagccacccaatattgcagatcatctgttctggtggatgcacgaagctgtgatataaatgccactcaggttacacatgtgctagtgctcagctgcgggccacatcctcactgcaggtcaacatgatgaaaattccaaccatcagttttatggggaaaaaagtcagaacgtggatgagttggagcagcccacctctggcttgggaaaaacaaatcaaagcccaagccctttaggacccagaatggcacataataatatgacagtgacatagggcagggcaggcccataaattaggtaccccagggcagagagttgactgtcaggcaaacaccaaagagagaggatcctttgaaagtttttttgtttttgtttttttctgaagacagagtcttactctgtcacccaggatggagtgcagtggtgtgatcttggctcactgcaacctctgcctcctgggttcaggcaattctcctgcctcagcctcgaaggagctgggattacagccacacaccaccacgcccggcttatttctgtatttttagtacagatggactttcaccatgttggccaggctggtctcgaactcctgacctcaagtgatccgcccgcctcggcctcccaaagtgctaggattacaggtctgagccaccgcgcctggccaaaaagtaacccataaacaactgcctgagggtgaagaagctagagtggcttccctccccttcttccccaggttagggttcatgcagagttaactgccctggctggtggtccccacccctcgtcctttcccagcccaaacaggatttggctcacatcttcattaaaatccatgtagttagacacgatgtggatgttggggtggaacactttcatctgtcggataatttcttccaggatatcaccaatgcccgcagaaaagatgaaaaggggaatgttgttatggtagagtgtgttgaagaaggtcttatatccctccctgaaaagagatggaggaattctgaaatggcactgcctctactgctgttctttgtttcctatttgggttgttttttgggttttttgtgagacagggtcttgctctgttgcccaggctggagggcagtggcacaatcacagttcactgcgacctcgacctcccgagttcaagtgatccacccgcctcaacctcccaagtagctgagaccacaggtgcatgccaccacacctggctaatttttttatgttttgtaaagacggggttttcctctgttgcccaggctggtcttgaactcctatgctcaagcaacccacccaccctggcctcccaaagtgctgggattacaggcatgaggcgagatcgcgccactgcactccagcccgggcaagagaacaagactccatctcaaaaaataaataaataaaatagagcatacgatatattcaataagcggttaaagtgtgctaatcctaagtgctcagctcagttaattttgacatatgtatacacccatgtaactaactagcttgaggctccctcgtgatctctcccagtcaatatcatccctcccattgattagctttgcctgtccttgaacttcatataaatagactcatacacaatgtactcttttgtgcctggcttattttgttcaatataatcctatgtagtttatctatattttgcatgtaatgagtttatcctttgtcactgcaatgcagcattattccaccatataaatatgccacaatttatctacccagcttctccttgatagacagttgagagatttccagatttcagctgttatggatacagctgccatgaataccctgtgcatgtcttatagtggctacatgccctcattcctctggggtacatacctgggagagatgctgttgtggtggaaggtaggcatatgttttctgttgctgtccatacaaccaggaagctaacctgggcaccttcactagggtacaaacactcccaccccggcacttactgggtcacacatctccactgtcttgacttttcaggagctagccaatctccccaattaggatgcacaacccttgagggcaggcacccatgtcactccttcctttatgaggatttctttcctccagaaaagaaatctccagcagagacagctgttcagtgaaggccgccaacgatcaagcgtcccagcctagccaactcccagtcaccatgaagaacaccagtcaccagacagaccccaaaagtcttttaccattgtgaaaaatgagctagacttggccgggcgcggtggctcgcgcctgtaatcccagcactttggaaggccgaggtgggcggatcacaaggtcaagagattgagaccatctggccaacatggtgaaaccctgtctctactaaaaatacaaaaattagccgggtgtggtggcgggcacctgtaatcccagcttactcgggaggctgaggcaggagaatcgcttgaacccaggaggtggaggttgcagtgagctgagattgcgccactgcactccagcctggcgacagagcgagattctgtcttgagaagagaagagaagagaagacaagagaaggagagagaaagaaagaagagctagacttggtttcttctcagagatagtgccctggccattttgtactacatccactacctgctgaatgtttcctagcaagggtaagaaatgctttagctgtatcacatcagttgttcatagtgccatgtcccttccggtcctttaagcaactaactgctctctactcttcccccgcctcctttttttgaacaaaacattctaaatagtctgatagaaatgttttccagagcaagacgcttacctgagcattgcattggactctctaaccacctgggctatctgaaacttctgaatcttctgctgacataggagattgtgtgctttggtccacctagaaacagacaccccagaaaaccccaaattcaaatcactgaagtaaataactcaccctttccctttacagagccaagtaccctctgacagcattgccgacagaggcctcatccttacgttagctgcccttaaaaggaagagggtggccgggcacagtggttcatgcctataatcccagcactttgggaggtcaaggcgggtggatcacctgagatcgggagtttgagaccagcctggccagcatggtgaaaccctgtctccgctaaaaatacaaaaattagctgggcatggtggtgcacgcctgtagtcccagctacttgggaggctgaggctggagaatcacttgaacccaggagggggaggttgcagtgagccaagatcggggccactgcactccagcctgggtgacagagtgagactccatctcaaaaaaaaaaaaaaaaaaaggaagaggatgagaaaagcaacccaacagagacaagtgctgggcaagctgactgctgaagtcggcactcttctgaatcccttcctccgtgaaccctctatctggagaactggggctctgtccagtgatgatgattgctgtggtttgaatgtgttggaaacttgatccccagtgtggaggtgttgagagatggggcctaatgggaggtgtcatggcggcaccatcctcatgaatggattaatgtcattatcacagatcccttataaaaagaactctctttctctttctctctcccctactctctttgcccttccacaatgagataatgcagcaagaaggccctcgccaaatgccagccagtcctttgatattggacttccctgcttccagaactgtgtgccaataaattgctattcattataaattacccagtctaggctgggtgcagtggctcatgcctgtaaccccaagactttgggaggccgaagtgggaggattgcttgagctcaggagttgaaaatagcctgggtaacatggtgagaccccatctctacaaaaaatagaaaaaatgagccaggcacagtggcacgtgcccgtagtaccagctacttgggaagctgaggtgggagaatctcttcagcccaggcagttgaggctgcagggagccacgatcatgccattggactccagcctgggcaacagagcaagactctgtctcaaaaaatagaaaaaatatataattcacctagtctgttattctgtgacagcagcacaaaacagactaaaagtcacttccacaaagcacttatcccccaacaccaagcgtctttaacttattccaaggattctctgagggtctccactctagcagcagccacaaaaagccctgggttcatctgaaaagttggttccaatagctggactaatagtattaaattaagccctcagtgaagtaagggagcctgtcatctcatcaagggtctggaaaaatatgcccctcccagcctactccatctcaagggcccagaagcttttctccaccaccatcactcaccattccaccatatgaggtagcttctccttgacggtccggtgtgggtcgatctcaattgggtaatagtggtgaaggagcgctgtgagctgggatatccaaatggggagaaaggccattagtccatatcaagttcttcccagcaacgtcctacagcttagtatgagaaaaaagtcacctagaagaggcaacttcatggccaggggcggtggctcacacctgcaatcccagtgctttaggaggctgaggcaggtggatcacttgaggtcaggagttcgagtccagcctggccaacatggcgaaaccctgtctctactaaaaaatacaaaaattagccggtgtagtggcatgcgcctttaatcccagctactcaggaggctgaaaaatgagaatcgtttgaacccaggaggcggaggttgcagtgagccaagacgagatcacaccactgcactccagcctgggccacagagtaaaactgtgtctcaaataaaaagaagatgcaacttcatctaagagagtgttacatgaaattttcttcaagttttcctttggggacatgtcatttataagacctaagtttctcttctcatattatcttccaacataatcgctcaatacactcacatttttacccatttggtgaagtccagggagcacctggatccacagagctggtcattcctttgtactcaccctgagagtgaggtctaaaagtcagcaatatgagattttactatcagagaagaagggtactaagatttttttgctgttattaattagctcaattttcagggcttaaccagtaagaacttacttaatgctgtgtttcccagaatgtggtccactttctcaggtgataggtaagaaaactttagggaattcatggagaagcgcttttcaactcagaagttttggattcattttcatgtacaattttttttttttttgagacaagtctcactctgttgcccaggctggagtgcagtggcgcaatctcggctcactgcaacctccgcctcccgggttcgagcaattcttctgcctcagcctcccgagtagctgggattacaggcaggcaccactacgcccagctaattttttgtatttttagtagagacagggttttgccatgttgtccaggctggtctcgatctcctgacctcaaccgatctgcccgcctcagcctcccagaaatgctgggattacaggcgtgaaccaccacacccggcctgtttctttataagttaattacaatttttaaaagcaggccaatttagagaaagatttagtaaaggtgatatacagatatggcaaaaaaaatgaaatataactagaagactgtactttgggacacagcatgttggtggacaattccgtcaaaagtgtcaatatcatgtgaatgcacagcatctatgtgtgtttcctctaaggtttccttctatgtgccaagactttgacactctaaaggggctgttccagggatcatgtgttacacagagccagtccgtaacagtgcctagtaaaaatgagaattgaccaagtaaagaattttaatacatgcatgattctcaggaacattacaagatcaaatggaatccctgtccatctgttcaaaagaagattaaatgaaagatgacatagtaacaaaggcagaaaacttctgaaatgtattaagattctcaatctgtgtgtttttttggagtgagaacctttctctaaaaatcaggctgggcaagatggctcatgcctgtaatctcagcactttgggaggccaaggcgggcggatcacctgaggttgggagttcgagatcagcctgaccaacatggagaaacctcgtctctactaaaaatacaaaaattagccgggcatggtgatgcatgctggtaatcccagctactcgagaggctgaggcatgagaattgcttgaaccgaggttgcagtgagctgagattatgccactccagcctgggccatagagcaagactctgtctcaaaaaaaaaaatacacacacacacacacacacacacacacacactagaacccaacagaagaatataaattttcttttaaaaaggccaggtgtggtagctcatgcctataagcccagcactttggggaggctgaggaaggaggattgcttgagctcaggagttcaagaccaacctaggcaacatagtgagaccccatctctacaaaaaatttttaaaattagctaggtgtaatgttacatgcttgtagttccagctactcagtagggctgaggcaggaggatcacttgagcctaggaggtcaaggctgcagtgaacaaagatcaagccattgcactccagcctgggtgatagagtgagaccctgtctcaaaacaaacaaacaaacaagctctgccatttggctgtatgaccctgggtaagttgctgaacctccagaatgttcaaatctcttgtaaactctatagccaacagtaaatataatgtccagttccaaccattaatcatcatatgtcctggccagtaaggaaaagctgtcttaatgtattaaaactagaccctccttagcaaaacaacaagtttttaaaaattaattttctaaggtctctatactggaatctttggttccaatcaggaaccatttgaagtagcaaatgacaaccatttctgagcaaaggacgggagcaacccacctctttccgacactcctcactgatgatcttgctattatccagaatatctggaaaaagagaaaactccttttacttgtcccttagaacccatcgtcttgtcaagctcaacaagggaagctagaatgtgacttactgtaagaagaagggcatcgctttccattatatgcaaacctgctcaaggtcatgtcaaaatcagaaatcacctataaggcaaaagagagatgatgcctaaataggcaccagaattctagtgtggccctgcctcagcctgggggatgattatggaaatcaatacagctcagtggccaggatgtaggcaaagccctaggggagttaccgagtgacacagagggatagaggggaagtgatcctaattagtacccgttaaccctgaggaaaacgcagtctcctagtgtgggggcaagggtgaatactcaggacccctctgactccttcaatatcaggtccctcctaagagatctctaccattacggcccatctggacatcttcaacttactggggagccgctggcttggggaggataaggccctaggtactggtgtgggcgccttctgtccaattagaggaagcagcatgaccatattgagaaatctgaaatttgggttttaggacaggcgaaccaacccgctctccttcaagctcccggccatttcttggggcagagagctaggaggggtccgcggcagagcaaagcgggaaggcccaatgggcaggaagcctctccagccgcccccagcccggccggcccccgcacgccccagaggtacctgtaaccggtctccgccgcccttgcggagggcgcccacgatctcctgcacccgcccaggctgccgcatcaggaccgtggccttcatcagggtgctcacctgtcccgagacccgagagaaccactgacccctgcgccacgctgggcccgaggggagcccggggctcgctcgggcgcgcgtgtgaggcggggccggggtgcgcgagggggcggctactggcctgggtgaagcggcggtgcctcggtgaccagctggggggctcgaagcgccccgggggtcggagtccgggcccgccccactccggacgcttcctccctcctcacctcctctgccatcccgttcgaggcctggtcggcggctcgcgggacaacgacagccccgcgaccgcactgcgcaggcgtcgcctcccgcctggagcccgggcgggggttggtggggccgggggcggggcgggggtggggccgagaatcgagcggtcccggagatggccgcgatccgggtgggcttgccggttgcgctaggcaaactggaggagggttctatttattatgaagagcagggtgaaggtcccaaggtgttggggttacgtgggtaggtagggttctgccactctttgtggaggaaaagccttgccaaacgtggtcatttccaggctgaaagtttgtgacaaaaacatgactggggctgggcgcggtggcccatacctgtaatcccaggactttgggaggccgaggcaggatgatcgcttgagccgaagagttcgagaccagcctgggcaatatgacgaaaccctgtctctacaaaaaatacaaaaattagccgggcatggtgacacgcacctgttgtagtcccagctactcgggaggctgaggcacgaggatcacttgagcccgggagatccaggctccagtaggccgagatcataccactgcactccaccctgggtgacagatgacaccctgtctcagaaacaaaaacagaaaaaccacacggctggatgggaggagagatgaaggagccataaactgaattctgttaatcacccagaaagggctctgttaactaggccattcctcattccagaagaaactgagtgactaacccatccagcgggctgggagacccgggacagctttctgaaatgtaatcagcgttggctgggcacggtgcggagcacttgtaatcccagctattcaggaggctgaggtgggaggatcacttaagcccaggaggtcgaggctgtagtgagttatgatcacaccactgcactccagcctgggtgagagagcgagacccgtccctagaaaaagaaagattttttttttgagatggagtctcactctgtcgccaggctggagtgcagtggagcgatctcggctcactacaacctccatctcctgggttgaagcgattctcctgcctcagcctcccaagtagctgggactacaggcatgtgccaccacgcccagctaatttttgtatttttagtagagacgaggtttcaccatgttggccaggatggccttgatctcttgaccttgtgatccatccacctcgtgctgggattacaggtgtgagccactgcgcccggcctaagaaagaaatttaatcagttttacttctcccttcagcctcaattgacttggatttccttgagttcggtgtctagggagccaagtgttgggctgtggaaggtagatgaatgctccagggatagagacctgtatcaggtgagtaacaggagctggaatcaataaacactcagatggtgctagtggtcatggttctgttttgggttcaaggacacagaaggaggtgtgaggtggttttcagcctaagtggggtggtaaggaggggagaaggaagaggacaagtccaggaggcagttccagaacctgagagcacaatcctgtgtgatctcactgcagggccaggattctggaacttgggttgcctgatagaccctatacaaaagatgtagtagggaaaaggagcgacagctggctaaaggggccccccacaaccctccccgacaccctaggaaagcagcctctctccgctgtcccagggtgccatggagatggagagcgcggcggcctccacacgtttccaccagcctcacatggagaggaagatgagtgcgatggcctgtgagatcttcaacgagcttagactagagggcaagctctgcgacgtggtcatcaaggtcaatggctttgagttcagtgcccataagaacatcctctgtagctgcagttcctactttaggtataacagggttgccaaattcagccaaaggggtaattgggctcattttgagacactttgatccattttctgtttcccaccccatcaccttaactttagggacactgtcaaagctctgggctccttaaaaattaaaaaaaaattttttttttagagataagctctcattctttcacccaggctggagtgtagtgatgcaatcatagctcactgcagccttcaactgctgggctcaaacaatccacctactccagcctcccaagtagctaggtctacaggcacatgctgctacgtccggctacttttgaaatgttctgtagagagggagtctcgctatgttgcccaggctggtcttgaactcctggcccaaagcgatcctcctgcctcagtctcccaaagtgctgggattaccactgtgcctggccaactctggtccaggcaggagctcctgcctggctcctttgccttctgaagaggcatgactagggtcagggccttttttctctcttttttttttttgtttgttttgtttttttttttccttttgctcttgagagatctgatttttgtcttttttttttgagatgagtctcattctgttacccaggctggagtgcaatggcgccatctcggctcactgcaaactccgcctccccagttcaatccattctcccacctcagcctctcaagtagctgggattacaggcgcctgacaccacgcccggctaatttttgtatttttagtagagacagggttttgccatgtcgctcaggctggtctcaaactcctgacctcaggtgatctgcccgtcttgacctcccaaagtgctaggattacaggcattagccaccgcgcctggcaagatacaatttttctttttttaagatggagtctcgctttgtcccccaggctggaatgcagtggcgtgatctcggctcactgcaaccgctgcctcccaggctcaagcgattcttctgtctcagcctcccgagtagctggaattacaggctcccgccaccatgcccagctaatttttgtgtttttagtagagacggggtttcaccatgttggtcagtctggtctcgaacacctgacttcgtgatccacccaccttggtctcccaaagtgctgggattacaggcatgagccactgcacccagcctttaaggtctgatttttcaactggatttcaaccaactattggtgggccaggtgctttaatctttgattctcacccaaaccaacctttgggaaggttggacatccctactggatttcagatgacaatgccacttcagggacccccctgtacccctatcccaatagagaccatttcaaacagggtgataaattaacaaggattaaggggatgggaagggagatgagggggaaatacccaggaaatatcagaagaaaaagggagtttgggctaaaaccattgtaacccaggaggtagaagggctattttgttcatgagctgaaaatgtttgagtaatcaattccaatgaagatatgatcaatgtgtcctacctgttgctaaaacttctcattcaggtagaccacagagcagagtccacaatttattttttatttttatttttttgagatggagtcttgctctgtcacccaggctggagtgcagtggcacaatctcagctcactgcaacctccacctctcaggttcaagcgattctcctgcctcagcctcccgaatatctgggattacagctgtgtgccaccacatctggctaatttttctttttttttttgaaatggagttttgttcttgtcacccaggctggaatgcaatggcatgatctctgctcactgcaacctctgcctcccaagttcaagcaattctcctgcctcagcctcccgagtagctggggttacaggtttcactatgttggccaggctggtcttgaactcctgacttcaggtgatccgcctgcctcagcctcccagagtgctgggattacaggcgtgagccaacgcgctcagctgagtccagaaatagaccaaatagtaattgttttaggtttttgcaggccacacagtctgttgcaactactctgtttttatactgcaaaagcagccttagacaatactaaatgaatgggtgtggctgtattccaataagattatttatggacactgaaatttaaatgtattataattttcaggtgtcacagaatattcttttgattttttcccccaaccagcggggcgcagtggctcacgcctggaatcccaataatttgggaggctgaggtgggtggatcatgagatcaggaattcaagaccagcctggccaagatggtgaaatcccatttctactaaaaatacaaaaaaccgggcataaatacaaaaagccgggcatggtggtgggcacctataatcccagctactcgggaggctgaggcagagaattgcttgaacctgggaggcagaggttgcactgagccaagatcaagccactgcactccagcctgggtgacagagcgagactccatctcaaaaaaaaaaaaaagattttttcctccagccatttaaaatgtaaaaatcattcttaatttgtgggcagcatgaaaacaagaggtgggccaaatttggacagagtccataggtttgcagacccctgctctagaggaagaatttgatttctaagaccacatttccttaaacttcttaaaaaaaggaagcaaaagccgggcatggtggctcacccgtgtaatcccagcactttgggaggccgaggcaggcagatcacctgaggtcaggagtgcgagacaagcctgaccaatatgatgaaaccagcctggccaacatggtgaaatcgcatctctactaaaaaatacaaaaatcagttgagcgtggtggcacacacctataatcccagctactcaagaggctgaggcaggaaaattgcttgcactctggagttggaggttgcagtgagccaagatcatgccattgcactctaccctgggtgacagagcaagaccctgtttccaaaaaaaaaaagaaaaaaagaaaagaaaacaattaataaaaagagaagcattcctgttctcatgaagtttaccccctggatggggaaacaggcattaaatgagtaaaatgcatatcaaatcatcataaatgcctgggaaaataagaaaaggaagataaaaagcagtgagtggccattttatttttattttttcagacagagtctcgctgtgtcccccaggctggagtgtagtgtcatgatcttggctcactgcaacctccgcctcccaggtttaagcgattctcctgcctcagcctcccaagtagctgggactacaggcatgtgccaccatgcccagctaatttttgtatttttagtagagacggggtttcaccacgttggccaggctggtcttgaactcctgacctcatgatccacccgcttcggcctcccaaagtgctgagattataggcgtgagccaccacgcctggcccaagagacctgggtcttactctcagttctagatcttaatttctccatccacaaggtaagagtgaccaaagtcagagttcttggaaaggtgttcttcttgtccactgtatatagcacatgcctgcaccccactttctcagaccatttccaatgtactcacctaacaggagagaaatgtttccgtggctgctagtttctttcttttttccagagctttgtttacaagtggctggaacaacactgaaaagaaggtatacaacatccctggcatttctcccgacatgatgaagctaatcattgagtatgcatacacccggaccgtgcctatcacaccggacaatgtggagaaactgcttgctgctgcagaccagtttaacatcatgggtatcgtcaggggttgctgcgagttcctcaagtcagagctgtgcttggataattgtatcggcatctgtaagttcacggactactactactgtcctgagctgaggcagaaggcctacatgttcatactgcacaactttgaggagatggtgaaagtctcggcagaatttttagagctctcggtcactgaacttaaggatatcattgagaaagatgagctcaatgtcaaacaggaagatgctgtatttgaggccattttaaagtggatttctcatgacccccaaaatagaaagcagcacatttcaattttgcttcctaaggtcagtgttcactcttgattcatttatcacagagagattgtcctaaaagcaaaattcagacatatgacagatcccaaggctgtatttacatgtccttagatagaaggcatctactattctctggaattttgcaactgtcttttcccttggcattactagttctttttacctaagttatattctttgaccaaaatccttcctggtggtgggggaagaagagagccttcaaaataattctaggtggggtgtggtggctcactttgggaggccgaggtggagaatcacttgagcccagagtttgccagcctgggcaacataggttataaaatttaaaaagtataaaatttggccaggtgcagtggctcaagcctgtaatcccagcactttggccaagatgggcggattacctgaggtcaggagttcgagaccagcctggccaacatggtgaaaccccatctctgctaaaatacaaaaattagctgggcatggtggtgggtgcctgtaatccaagctactcaagaggctgaggcaggagaatcgcttgaacctaggaggcggaggttgcagtgagctgagatcatgccactgcactcaagcctgggtgacagaacaagactccatctcaaaaaaaaaaagaaaaaaaaattataaaatttaaaaattaaccaggcttggtggtgcatgcctgcagttccagctactgggtggaaggctgaaatgggaggactgcttgagcctgggaggtcaaggctgcagtgtgctgtgatcacctcactgcagtccagcctgggcaatacagcgagaccctgtctcaaaaaaaaaaaaaaaattctaaagggctgaaattcctttcagcttttttcctttctatgaatttctccatacccaaggtagaagttgaattagaaatcatggctggcacagtggctcatgtctttaatcctagcactttgggaggcggaggcaggtggatcacctgaggtcaggagttcgagaccagcctggccaacatagcagaacactctctaccgaaaatacaaaaattagctaggtatggtggtgcatgcctgtaatcccagctactcgggaatctgaggcaggagaataacttgaactcaggaggcggaggctgcagtgagcccagatcgcaccattgcactccagctgggcgacagagagagacttggtctcaaattaacaaaaaaaaaaaaaaaaatcttaagtattgcacacaattgttgtcagttggtgctaataagcgttattttacatattaagacatactcaattactgaacaattaccatggtttttcttggtctaatagtactgaccactaaccaaggaatgggattgctctctggccacttgaggtgccttctatctagctcattctcagcttccaaatgtatatatcacctccccataaataaatagtaaataaatatttattatttatttatttattttgagaaggagtctcactgttgcccaggctggagtgcagtgatgcgatcgcggctcactgcaacctctgcctcccaggttcacgccattctcctgcctcaggctccccagtagctgggactacaggcacccgccaccacgcccagctaactttttgtatttttagtagagacggggtttcaccgtgttagccaggatggtcttgatctcctgacctcgtgatccgcctgcctcggcctcccaaagtgctgggattacaggtgtgagctagcgcccggctgacaactatttatttattttgagacaagtctcactctgtcacccaggctggagtgctgtggtgtgatcacagctcactgcaacctccacctcctgggttcaagcaattctcacaccttagcctccagagtagctgggactacaggcacgcggcaccatgcctggctaattttttttttttctttttttttgagttggagtctagctctgttgcccaggctggagtgtggtagcacgatctcggctcactgcaacctccacctccccagttcaagcgagtctcctgcctcagcctcctgagtagctgggattataggcacctgccaccacgcccagctaatttttgtatttttagtagagatgggggtttcaccacgttgaccaggctggtgtcaaatgcctgacctcaagtgatctgcccacctcggcctcccaaaatgttgggattgcaggcgtgagccactgcactcagcctggtttttgtattttttttttttttttttttttttgagacggagtcttgctctgtggcccaggctggagtgcagtagggtgatctcggctcactgcaacctctgcctccctggctcaagcgattctcttgcctcagcttcctgagtagttgggattacaggtgcgtgccaccacactcagctaatttttgtatttttagtagagatggagttttgccatgtcggttagcctggtctagaactcctgacctccggtgatccgcccatctcggcctcccaaagtgctgggattacggccgtgagccacctcgcctggccccaatttttgtatttttagtagagacagggtcttgctatgttgccaggctggtctcaaactcctggcctcaagtgatccacctgctttggcctcccaaagtgctgggattatggtgtgagcctcaaaatcgactatttaaactgtgacttatacatttcaaaaacaaaccaaaatatttccagcaattcaaaggcagatcgaaaaatgggagttaaggatgtgggatttcctggcactctcacgtcacctgaatgactttctgcgtttgcttcttaggttcgcctggccctaatgcatgctgagtacttcatgaacaatgttaagatgaatgactatgtcaaagacagtgaggaatgcaaaccagtcatcattaatgccctaaaggccatgtatgacctcaacatgaatggaccctctaattctgatttcaccaacccactcaccagaccacgcttgccctatgccatcctctttgcaattggtggctggagtggtgggagccccaccaatgccattgaggcatatgacgctcgggcagacagatgggtgaatgttacttgtgaggaagagagtccccgtgcctaccatggggcagcctatttgaaaggctatgtgtatatcattggggggtttgatagtgtagactatttcaatagtgttaagcgttttgacccagtcaagaaaacttggcatcaggtggccccgatgcactccagacgttgctatgtcagtgtgacagtcctcggcaattttatttatgccatgggaggatttgatggctacgtgcgtctaaacactgctgaacgttatgagccagagaccaatcaatggacactcatcgcccccatgcacgaacagaggagtgatgcaagcgccacaacactttatgggaaggtaaaggaccagggtgggaggggaagatgtggatgcaaagtacaagaccagaaatgatactgctcttttttggggtggatggaagacgcagtggcagtattcactttggagtactcattctttcttcaattgacaaggtgactagttgcaactgtcttttatgttgtttattgaaaagtaatgcaaagccgggcacggtggctcaagcccgtaatcccagcactttgggaggccgaggcaagcagatcactaggtcaggagttcaagaccagcctggccaacatagtgaaaccctgtctctactaaaaatacaaaaaattagccaggcctggtggcgggcgcctgtaatcccacctactcgggaggctgaggcaggagaatcgcttgaaccccggaggcagaggatttcagtgagccaagatggcgccatttcactccagcccgggcgacagtgcaagactccatctcaaaagaaaaaagaaaaaaaaagtaatgcaggctgggctcggtgactcacgcctgtaatcccagcactttggcaagccgaggcgggaggatcacaaggtcaggagattgagaccatcctggctaacatggtgaaaccctgtctctactaaaaatacaaaaaattagccgggtgtggtggcaggcgcctgtagtcccagctactcaggaggctgaggcggagaatcacttgaacctaggaggcggaggctgcagtgggcagaggttgcagtgctccaagattgcgccactgcactccagcctgatgacagagcaagactccgtctccaaaaaaaaaaaaaagtaatgtgtaatgtggcagagcccagtgtcttgtgtttgtaatctcagcactttgggaggccaaggtgggcggatcacttgaggtcaggagtttgagaccaacctggccaacatggtgaaacccggtctctactaaaaatacaaaaattagccaggcacagtggcacacacctgtaatttcagctactcaggaggtggaggttgtagtgagccgggatagctccactgcactccagcccaggcaacagagtgagactccatctcaaaaaataaaaataaataggctgggcacagtgtatcatgcctgtaatcctagcactttgggaggctgagaggggcggattgccttaactcaggagttcgagaccagcctggacaacacggtgaaacctcgtctctactaaaatacaaaaaattagcggagcgtggcagtgtgcgcctgtagtcccagctactccagatgctgaggcaggagaattgttagaacccaggaggcggagtgagcagagatggtgcaaatggactccagcctgggtgacagagcgagactctgtctctaaaaaataaataaaaagcaatgcatgcacatacaaaaaaaagaaattcagactgtacagactggaattaagtgcccactaccaccacacacatatcctttctttctactccctagagtgggaattttaataatcttggaactcttcacacaggtctacatatgtggtgggtttaatggaaacgagtgcctgttcacagcagaagtgtataacactgaaagtaatcagtggacagtcatagcacccatgagaagcaggaggagtggaataggcgtgattgcttatggagaacatgtatatgcggtaagtttatctagtaccacacacacacaaaaaacacattacccctagattttgtattagtaaatgggtttatgctactattggtaagtatttgaaaagctttttttttttttgagatggagtctcgctctgttgcccaggctgtactgcagtggcaggatctcggctcactgcaagctctgcctcccgggttcatgccattctcctgcctcagcctcccgagcagctgggactaccggcacccgccaccatgcccagctaattttttgtatttttagtagagacagggtttcactgtgttagcccagatggtctcgatctcctgactttgtgatccacccgcctcggcctcccagagtgctgggattacaggcgtgagccactgcacccggctgaaaagctttttttcatggaagataatggaagagggagttatgagatcactggtacccccaacaagggcttcctcagtgaacagaatcaatggttagcagtcaaccgtgtttcttttgctatccacaggtaggtggctttgatggagctaatcgacttaggagtgccgaagcctacagccctgtggctaacacttggcgcacaatccccactatgtttaatcctcgtagcaattttggcatcgaggtggtggatgacctcttgtttgtggtgggtggctttaatggttttaccaccacctttaatgttgagtgctatgatgaaaagaccgatgagtggtatgatgctcatgacatgagtatataccgcagtgctctgagctgctgtgtagtaccagggctggccaatgttgaggaatatgcagctagacgggacaacttcccaggattagcactgcgagatgaagtaaaatattctgcttcgacaagtaccctacctgtatgagcctcttcatttagctaataaaaagtctaagcaataagaattaattctttttttaaaaaaatgcagtgtttaaactttgaagagtactggaaaatgttcaacttaagagagccaatggctggatgaatgagggagtaggagggatggaagaaagcaattatatccgacagtgcataaataagaaaaaaaagtcacacagtacaaaccagctttaaagaaatatgtttatttaaaacttacactgagacaattagtagctttaacagagaacaagatagcttcaggaacataaaacaagctattttacaatgtcatgtctcaaggtgttctaaatgctacatctcctctgagttaaggggagatagtgaagattatattttcagtagagtagggacctggatactactagtccaaaaaacttactgcatcaactcaaactaaatgtttattttacaaataactcaacgagcccaagcacacggatcataaaatcttcaaacacctagcaagcactacttttcacgagtgcattatgcaggaggactaagttaacaagtgctctgcagtctgtgcttcaatgtaagacattcgtagtgatggtcactgagtaagataaaaagccctacaagtgtaataaacaaaccgcagtgattttgctatctaattaaattacttgaagcaaaatgactactaggttatattactgttattatattacatcacccaactatgagctgttctgtttccaatgaccagaacatacggtacaataacaaaaacaaaaaatggactattctcaagaaagtaacaaactggagtgatgaactgtgccaaaatgtttgagagactgaattgtttctcaaatattttgcagttaaagcaccctctggtgtagacagagtacttggtttacagtaatgtacaacactttcaaagacatgaaatgtggcccgtatactatatttaaacttaatttgagaaaagtatcaaaaaagaagtccctttagttatgcttgattagaccaaataactaaaatatacaaatcagctctcctgtctacatacagtatagtgttgactttagaattacaaagcagaaaatgaaatattttaaacataccacatgctacactagtcaagaggtaaggaggaaaagtgagccctagaaactgccttaccagcagcctgacgggtttaaaaaacacaaaagcacacaaatcttccataaacactatctttccagcttcaaacttctgttttatattaaaaaggtatatttaaattttttggtcccagaaatactatataaaaccgggtgatcaaaacaaaacttatgtcatgaattttaagagtttttagcaaaaaagatatttttgaactggcacagcaaaagcaaagttgaacatcatgatacacaagactaatcatgcaaacaactgtaagtgggatgtgttacttaaacactaagctcatgactgacattctcaatatataccactgatttttttaagccatggtggggtagatatagttcaaggatacccattctaagatataagtagcctcactcaaagttacatatactattactttttggtataataacttcctctctcttctacaaacaaaagcaaaagcaacaaaacaaaggtttgcttgaatacgcattaagctgtctttctaaagtcatgtttttaactgcttacattaccaaaaacaatattttaagttttctcatcaaaaaggaaatttctttcccaaggagctattttaggcctgatccttgtacttagaacctttccaaatactctgggaagttatttccagtttagaatttcagaatgtcagccttgaacagatttaagcaaatctggtttctttccttattaacaagttagttaggatatttcagaaacacaagttattgatgtgaaattacacatgtgaattcaaaaataaaaattagaaaatcaggaaaacctgcacacatcatcatgcaatgaaggacttaccccttcttttcagccatggcctaggctgcctgctaagttaaaaaacaacagtttcaatcaaggttttaaaaccagattatgcctaaatcttatgagttataatttctgtcacatgatgtgaaaaaaacacaaccccacaaatgacttggtaataattatctcagaagacaactctgagaacaaaaaacaaaaaacacatcacacccttccagttaaaaactattatcgtagtgagatactaaattatttaaatacaatcaagaaaacgaagtttgctagcacagtctgttggagagaaatgagaacttcatttagtgagcttcatttaatgattctgtcttacttgcatagacctatcacagctaagaattagtgcttctcagaatccaaatggcttttactaaaataactacaaagaaatagaaattgagaaaaaggtagtggtgggatgggacaatataataatatatccttatatgtagaaatagacttgcagtttctcacgcccactccagtctaaattaaatggatttaaagttgattttcaacacatttattaaaaacttttcacctaggcagggatactaatttaaaaatttcaagttcttagtatagagcccaagacctacaacttgcagcaaatagccaaaatttctggttgtgcttttctcttttggtatttgatcactaacaagaagattaactataatggactagggaaaaaaaaaatcactgcacttggaatttgacttctagaatggtatgacaaaatgtctaagaaggtaaagacagttcttaagaaacaggataaatcattggacaggtggctctttgggaggccaaggtgggaggattgcttgaggaaaggagcttgagaccagcctggccaataaggtgagacctcacatcttaaaaaaccaaaacaacaacaaaaacaagaaaaccacattgtaaactgttaggaatcctttatattaactgagcattaagagtaaatttgagggctgggcatggtggctcatgcctgtaatcccagcgctttgagaggctgaggtgggcggatcacgaggtcaggagttcgagaccagcctaaccaacatggtgaaaccccatctctattaaaaatacaaaaattagccgggcgtggtggtacacacctgcaatcccagctactcagcaggctgaggcaggagaatcacatgaacccgggaggtggaggttgcagtgagctgagactgcgcaactgcactccagccagggcgacaaagcgtgactgtttcaaaaaaaaaaaaaaaagttattttgaggccgggcgtggtggctcacacctaatcctagcaccctgggaggctgatacgggtggatctcctgagcccaggagttggagaccagcctcggcaacatggagaaaccccatctctaccaaaaatacaaaaaaaaaattagctgggcgtggtggcgcgtgcccatagtcccagctactccgtatgctgaggtggcaggatggcttgcatccaggaggtggaggttgtagtgagccgagatcataccactgtactccaacctgggtgacaaagtgggaccccatcccctggcccaaaaaaaaaaaaaagtcaatttgagtgctaacttttataaagctcaggagacataagataattcgaataacgtataaaactaaataaaagatagcttcagtgatctttttaatttttatttgagacaccgtctctctgtcacccaaggtagagtggcatgatcacagctcatttcagcctcaaccttcccaggctctggtgatcctcccaccttggcttcaagtaggaaggactacaggcacgtgccagctaccacactcagctaatttttctactttttgtagagacaggatcttgctatgtttcccaggctggtcttgaactcttgggctcaaaatctgcccacctcagcctcctccaaagtgttgggattacagtcatgagccaccgtgcccagcccataaacctttaaaagccaaaattatgtacccaaatttggtatcctaggctcaggcaaagtttgaaagtgtggggcaactggataaaatataacaatcagaaataataaggcttctctttagcaacatttctctaaattgtgacttccttcccattttggaaaaaaacagtttcttgtagaaaagaataatggactgggcacggtggctcatgcctgtaatcccagcactttgggaggctgaggcgggcgtatcacctgaggtcaggagttcaagaccagcctggtcaacatggtgaaaccctgtctctactaaaagcacaaaaattagccaggcgtgatggtgggtacctgtaatcccagctactcgggatgctgaggcaagagaatcactcgaacctggcaggcagaggttgcagtgagccgagattgcaccactgcactccagcctgggcaacatgagcaaaaaaaaaaaaaaaaagagaaaaggaataatgaagattctatataatatgcattagagcaaaaattaaaatggaaggcattgagtgtcgattgtcataggcattatttacactcattaacatatcctcaaataatcctgcaactcctgaaaaaaatgttgaaaaaattttaaatgcctttgatttcccagtctacactaatacttttcttcttagagaaacaaagttcacacatgtaacttgctctgtatttagtcaattagctaaagatctatacttttgccaactaccgtcacctcagattgaaggcttaaagtctataaacagctgctaatgaaaaatattcaaaaaatgcatgagccagtaaaaaatttctcatcagtcacatcttctaggaaggaaactggcatttctagataaacataagaaaatatcaatgcaaacattctcaaattatcttgctgaaatattgagtgttttcattcaaatttcagtctcactattgcacatgcctcctgcagatgagggctcaatgcagaagtcagatcttgccaaaaccaatcatttaataaaaaatgaaaaagaatatcaaagtaaatgtgcaaataaaattggtgcttaaagcatgttcaaaacgtaagtcctcaagacaaaggagtcataactcgttggcaggaaaacagctaagcaactacacctgatttttccacttgtccttaataagatcttatttagctagcacaaacaaacaaaccaaagacaaaaattgcaagctaacaaaatgaccatgtattgaactgagtctcccattctttagtttttaactctatttcctttatatggggtaataatcagttcatgtagaaaataagttatcgacatacttttttaaataacagcctgggtatcttcagcttcacgaaacgggtgtaacagttttaatcggcacgcttgagagaacctagcattcaatctgagagcttggcactcgcctcatgttcagggcgtgacgatgtatctcttgcatctgtctgatgcggtccttctgccacatcaggttttgaggcatagggtatctctgtgtgccatgcaagtaccggtatgggatcctcacgtgacaagcagtggctctacaacgaggttgtggcataggaggaagaagcatccacctcttcctctccgcacaatatcggtaggcttctttccgatactgtttatcaatatcatcactgtttttccagcctcctataatgaagacatcatctttgtaatagcaaatggctgctccttcgatgcttaggacttctggaggcaagctttcaaggatctcatcagacacttggctggcaatttttcttactgcctcttcgttttctaaacaataactcttgggacaacatgatgctgtctgataaaagtttgaattgaccacagacatttggaaaaagcagtaattgtcaataagcggcaaagattccacatcttgccactgtcgagtctctgtatcatagcaagtaattacagcctttaatccatcttcagtgtcccggtctacaggagtgcgggcggcaatgtatacaaaccggtcttcaatggctagtgctttgacatctcgaagaatctttggtgccgattccaagttgtgccatttatcaagctcaggattataaacagtcacatctttaaaaccaggactaaagttgccatgtcctccaatgctatagagcttccctttgacttctgttagtccaaaagaatgctttcttgtcatcagactacaaacatgttcccatgtattcaaatttgggttatacctttctacagttttagcaaaccctggctccattgatccagcaacatacacgtaggattctgttactgcaacagcatgtccatcgaggtgattatgaatatgtggcagatttacccatctgtcctcatcaacaaagtatcccacacattcacttaaatagtcccctccttctgacacacctccaataaccatgatcacatccatgttttgcccataacgaggcaatagtgacacatgagaagtggggtgctggcatgtgccagattgtatattctcagctctcagagcatgtctctccactgcgtcagcgaccaacttgacacaaacttcattattggctaccagcctctctggtttgacatgtcgagtaaggtaggtaggtttcatctgggacaacctgagcaatttaaaaagttcttcaaagtatctctctctctcttcagcatttctctgaacccatttcaaaacggtttcaaagagaacctcttcagaatcaactgtaatttccaaatctgaaagccagtctctaatgagatggaaaggtaacgtataaaattcttcatcctgaatcactttgtggaaatttctccgtatcatatcagcagccttcagagcaagttggctcagggtgtacatgtgtgctaagctatgaattgccacacaatttgagagatgaagttttttcttgagaaattctccacaaaattcttttaaacgaatgagtaggaacctaaaatcaagaaaaagagaaaagattaatttttcaaatgtgcatattttatgtggttacttttttcttttttttgagacagggtctcactctgccacccaggttggagtgcagtggcgtgatctcggctcactgcaacctctacctcctgggttccagcgattctcctgcctcagcttcctgagtagttggggcataccaccatgtccagctaatttttgtatttttagtagagacagggtttcaccatattggccaggctggtctcaaactcctgacctcaaagtgatccgcccgccttggcctcccaaagtgctgggattacaggcgtgagctgccgtgcccggcctacatttttttttttttttgagacagagtctcactttatcggccaggctggtgtgcagtggcacaatcttggctcatggcaacctccgtctcccaggctcatgcaattctcctgcctcagcctcccaagtagctgggattacaggcgtgtgccaccacacccagctaatttttgtacttttagtagagacagacagggttcaccatattggccaagctggtctcgaactcttgacttcaaagttatccgcctccctcggcctcccgaagtgctgggattacaggtgtgagctgccatgcccggcctacaccatcccccccccaaaaaaaaactccaaaaaaacagagtctcactttatcggccaggctggtgtgcagtggcacaatcttggctcacggcgacacccttctcccaggctcatgcaattctccttcctcagcctcccaagtagctgggattacaggcgtgtgccaccacacccagctaatttttgtatttttagtagagatggggtttcaccatgttggccaggctggtctcgaactcctgacctcaagcatccacccacctcagcctctcaaagtgctgagattacaggcgtgggccactgtgcctggccatggcctacatttaaaaaaattattatttttttgtagagatggggtctcactatattgtctacactggtcttgaactccttgctttaagcaatcctcctgcctctgcttcccaaagtgtttgggattacaggtgtgagccaccacacccagcctatggtcacatttcgagagcatctaaattatacatatggaaatagttagattaatctcactttacacacaaaatctgaaaacaacagcaacaacaacaacaacaacaaaaaacaccaccaaattagaaaatattgtgctggcaaagtatgtttaaaagcacatatacgctgggcatgggggctcacacctataatcccagcactttgggaagctgagggtcgcttgagccaggagttcaagaccagcctgggaaacatggcaaaaccaagtctctttaaaaaaaaggcacatggctgggcgcagtggctcacacctgtaatcccagcactttgggaggctgaggcaggcagatcacttgaagtcaggagtttgagaccaggctggccaacaacatggtgaaaccttgtctctaataaaaatacaaaaattagctgggcatggtggtgggcacctgtaatcccagctactcgggaggctgaggcaggagaatcacttgaatctgggaggcagaggttatagggagctgagattgcgccactgcactccaggttgggtgacagagcgagattctgtctcaaaaaaataaaaataaaaagcacatatagagctgggcagggagatgcatgcctgtagtctcaactactcagggggcttaggcaagaggattggctgaggtcaggagttcaaggctgcagtaagctataatcgtgcctgtgaatagccactgcactccagcctgggcaacatagcaagactgtctctttaaaaaaaagcgtatacaggccgggcgcagtggctcacgcctgtaatcccagcactttgggaggccaaggcgggtggaccatgaggtcaggagttcgaaagcagcctggccaacatggtgaaaccttgtctctactaaaaatacaaaaaaattagctgggcatggtggcgggcacctgtaatcccagctactccagaggctgaggcaggagaatggcttgaacccaggaggcagtggttgcagtgagccaggatcgcaccactgtactccagcctaggcaacacagcaagactctgtctcaagaaaaaaaaaaaagcatatataaaaatcttatttatatataaaatataaagtattatttatattagtttatataattacctatcatatatgtgaaatacatacatatatacacacatatacatatataaaaacacaaaatagagtttttattttaagagacagggttttgctatgctgcagtggctgttcacaggtgcgatcacagtgcgctacagccccaaactcctgggctcaagcaatccttctgcctcagcttccagagtagcagggactacaggcacatgctactgtgtctggctggaggtttttcttctcttttgtttagagacggtgtttcactcttgctgcccaagctggagtacactggcgcgatctctgctcactgcaacctctgcctcctgggttcaagcgattctcctgcctcagcctcccgagtagctgggattacaggcgcgcgccaccacatctggctaatttgttgtatttttagtagaaatagggtttcactatgttagccaggctggtctcaaactcctgacctcaggtgacccacttgcctcgccctcccaaagtgctggggttacaggcgtgagccaccacgcccggccacacactttattttcactttaatttgtccttggcaaaggcaaatccctatccaaacttgtctttgccatcctttcctaattccttgctagtcaccagcctctttttttttttttttttttttttgagacagatcagattctcaccgttacccaggctggagtgcagtggtgcaatcatggctcactgcagcctcgacctctagggctcaagtgattcccccaccttaacttcccaagttgctgggactacaggaacatgccaccaaacccagatatatatatatatattttttgttgttgttgttgttgttgttgttgttgtttttctccccgagatggagtttcgctcttattgcccaggctggagtgcaatggcacaatcttggctcactgcaacctccgcctcccgggttcaagcgattctcctgcctcagcctcccgagcagctaggattataggcacctgccaccacacccagctaaatttttgtatttttagtagagacagggtttcatcatgttggccaggctgggctcgaactcttcacctcaggtgatccacccacctcggccacccaaagtgctgggattacaggcgtgagccactgtgcctggccacccagataatttttttttttgtatttttttgtagagacaaggttttgccatgttggccagactggtcttaaactcctgagctcaagcaatctgcccactttagtgctgagattacaggtgtgagccaccatgcccagcccaccagcctcctcttaaatgaaacagggtctaagtgaagggactttatggtataaagtaacagccaggcaggaacttctttggggatctgctcagtcagatatcagaaggaacgccccccttactcagatttaggctttctgctagaggttttatttcatttttaaatttttctccaggatcatagattcaagttgccctgaatatatactccctgtgtcagaggttttaatctcgtcaccagagctttttctttgggcagccagaggggatggggtactgagaagatttgtcctgaattgggttctcatcaaagcagggatgcaaagcaaactcaaacatctgaagaagcagaaaacaaaacaaaaacacaacaaaaaaattgtgtagggttgggcgcagtggttcaggccaggtgcagtggctcaggcctataatcccaacactttgggaggctgaggtgggtggatcacctgaggtcaggagttcgagaccaccctggccaacatgatgaaaccccgtctctactaaaaatacaaaaaattagctgggcgtggtggcaggtacctataatcctagctactcaggaggctgaggcaggagaatcgcttgaacccgggaggtggaggttgcagtaagccgagatcatgccactgcactccagcgacagaatgagatgctatctcaaaaaaacaaaaaacaaaaaacaaaacaacaacaacaaaaattagctgggcgtggtggcgtgcatctgttatcccagctactcaggagcctgaggcataagaattgcctgaacctggggtcagaggttgcagtgagctgagatcacgccactgcactccatcctgggcgacatagtacaaagcatgtgtaggttaaaaaacaaaagaaagtgatctggcatgtagctgactagatattgtctgctcacctaaatccatttaaagtttaatttaaaaaaaccacaatcgtttcagacaaattcataaatctggcagcaatcagcctgaggatagccaatttgagaccactgctttaaaaagactaagtccccagaaccgagaagaaccttaaacaagattaagaatcacttcatcaattcaggcctctcgcaattcagtaaccgtttgttattagtgactgtgcttagtaactctcttaactatgatatgaaaatcaataaggcaggctcccttcactcttttaagagaacatatcattttagagataaagcaaagacaaagtagagtggtatgggatatagtggctcccagacatgtctgggtgccagtgtcacctgattcccaggctgccctgggctcctagttttagcaggcactccaggtaatttggagacaaattcccttaagtgtctggaagcaatgctctatgaaaatagctgtcatacacttggcatctgtcatgtgaggggcattgtgcacatcctattattatatttctgatccttacaaatgcccagtgaggcaggcatgatcatcaacagacatatgtacttaggggttttggggggggtgggggcgggtcctgcctcagagctgatgggaagattaaatgtgatggttgcagggcactttgaacagtgcctgacaaaagccattggcttagctgctgacagatggagagaagttaagagtttttagtaaaatgcccagagtatcgtctcctctcctctaactccccaatagagcaggagcaaatctgacaaactcaagatgatatgacagaatcaaacctaggtttgagtgagtgcaatgacccttttccacccattttcatgcaacaaacctctctccctcagagctatgcccatcccactccaccttctcattgatgacccagcctcttgagaaaacagagacaatcaagcaggaacttcatcttcccaccacccaatccaccagcagttgtaccctatactttgcagtccaaccattccaattttaatatggattctacactgaagaataaccagaatatttcaccccaaaatatactcatttgacatattcagaggggccgaaaccacaggaatagctttgaagagctgtcttttgtgggggcgatttgcatctgtagagaaaatctacattaatgaggtaaacagcaaggaaaacagggatgcaaacaggctttctctgaggcctccccttactcagatcgaggaaagacgcactcacaggaaaaactaaggaggctaaggtctgacactttaaagatctgacagaaacttttcccacaggctacatccattttttctgacagctgctgcccgtgaggtttcacctgcataacaggacagcctgtgcttgccaggctttcctctcctggctctcccataacctgtcttgatgcattccaagcccctattcctttctataaccacaggatggtataaaaacttcagtcacccttagagttttcatattttgtatgactctcgagcacaaatgtgcctgtaataatctgctatgcttttctctgtcctatataacctgtcttttattataagaatgtcagctgtggccaggtgcggtggctcacgcctgtaatcccagcactttgggaggccaaggcgggtcaggagttcgagaccagcctggccgatacagtgaaaccccatctctactaaaaatacaaaaattagccgagcgtgctggcagatgcctgtaatctcagctacttgggaggctgaggcaggaaaatcgcttgaacccggcaggcagaggttgcagtgagccgagattgcgacattgcactccagcctgggaaacagagcgagactcttgtctcaaaaaaaaaaaaaaaaaaaaaaaaagaatgtcagctgtgacccctttatgagagggaggaaagggatcacccctcttccatcccgacagttcccttcttggttgcaaggactttactcctgcaattattcccctgctcctgtaacaccaattactcatcttctactgaatcattttcagcagcacacagacatgctctagtatcttttaccttggtgggattgtcccccaaaacatttacacgtttctgatcctctttataaagcaaggcttaacagctcttgtcaatggcatctctgacctgcaaccatcactaatgggttgacagagttgacacgactggctactccctccttgatatccttcttttctacgtttccatgagatcagtctcctctttaagattcttttttttttttgagatccagtctctcactctgttgcccaggctggggtgcagtggcgtaatctcagctcactgcaatctccacctcccgggttcaagcaattctcctgcctcagcctcctgagtagttgggattacaggcacctgccaccacgccctgctaatttttgtatttttgtatttatttatttttttttttgagatggagtctcactctgttgcctaggctggagtgcagtggcacgacctcagctcactgcaacctctgcctcctgggttcacgccattctcctgcctcagcctcctgagtacctgggactacaggcacccgccaccatgcctggctaattttttttttttttgtatttttagtagagacggggtttcatcatgttagctaggatagtctcgatctcctgacctcgtgatctgcccacctcggcctcccaaagtgctaggattactggcgtgagccaccgcgcccggcctaatttttgtatttttagtggagatggggtttcatcatgttggccaggctggtcaagtgatccatctgcctcggcctctcaaagtgctgagattacaggcgtgagccacttcgcccagccggctattttacattctagagaaccccagggctcagtcttgcctactctctccccgctgccccttttctatgtatactccttaagtaataccatccagccccaaggctttagttaccatttatacggtaattttccccaatctgtatctctagctcccatgcacttcccagggatctccttaaccaaatccaaaaactcctgatcttactcccaaacaggctcttctgcaatcttccacatcttaataattccatccttcccattgcttgggtcaaaaaggtagcagtcttttcccttataccccacgtcaaatccatcagcaaattcatctcatccactttcaaaatatatctggaaccagagcagttctcatcacctttacttctccctcctcaatcgaagcctccaccaccactgccacaacctcctacactagtctctctgcgtctgcccttggtgccccctcctccccaatgccacatcctttgttcttttttttttttttttttgagacagagtcttgttctgtccgccaggctggagtagagcggcgcaatctcagcttactgcaacctcagcctcccacctcccaggctcaagcgattcttgtgtctcagcctccccaacagctgggattacaggcacaccaccacgcccggctaatttttgtacgtttagtagagacaggggtttcacaatgttggccaggctggtctcgaactcctgacctcaagcatccacccacctcggcctctcaaagtgctgagattacaggcgtgggccaccgcgcctggccgccacatccttttttcagcacagcactattcatcaaatcagactgcatcattcctctgccccaaaccttcccatttcaatcagagtaaaagctcatgtccttccacaggccatcaaggccctacgggatctggatccctgcccattaccatcctggggcttctcctgttcctctcatcctgcatccctttgatacagccacactggctccccactgttctctaacatacaagctccacctcagagcctctgtacctgtgtcccctacctgacacagtctaccttacctccttcggttcttagcaaaacgtcttcttcatagggcattctctatccacccaatttggaaaacacttcctctcccccagcagtttctatgtactccccccatgctttatttttcatcagtgatgacaatcatccaacaggctatacatttaacaatcatccaacaggctatacattttacttatttaccgtccatctaccaacctaagtgcgataaggaaaaggacttttgtctgttttgatcactgctgaaaccctagcaccttagaatcccgcatctgagctgatgcgtaataggcgctcaataggcatttttgttaatgtatctgtaagatgataattgccaaaacaaacgcctctccatctctataaacggtattacctgccttctaaccagtctctggagcattcctgctccctacaatccgtttaacacagtggcagaataatattaaaatatttaaatgagctatttctttacccagcttcctatcacacttagtgaaatccaaactccttattccaacgcatctcacgcatccttctccccttcatccactagatccagcctcactggactatattttaattctcttctctaagccaaactggatcctgcctgagggcgtttgcgctgtctggaatattcattccccatctttgcacggtcagttattttttgacattcagaggtcgatctaaacttcacctcttcagaaagatctttattcaatccctagcctttcattccttttgaacgtcagcacaacagttaccacatactgactttccttttcatcacttttgtcccatcacctagtatctgagctccttgggcgcggggcgccctcgccggacctgatggtgcatcctcctcgcccaccgcggtggctgcccccaagcaggcgctcagcgagtgtgaaaccaatgcattcactcaggactcgcgagctgccgtggcaggcactgccctcccctccgccagcgagcatctccccctctccgcgcccgccgccctccgcgctcccgcctccctcgcctacctgtcggccaactccagcacctcgtgcacgctgcccgtgctgacgcggatgcgcccggtgtacatgtactcgattacggcttccactgtgtcgggttcgggccccggctcggagctccacttgcgcatctccacccgtcccgagcgggactcggaaaactggcccgagagcaggggcgtgaagtactcggtggcggcagccagtaccgagcggtgggcccggaactcgcggcctccagccccgccgaagcacagggtaatgtcgcagaagaggccctggcgccgctgctcgttctgccgccaggacagctctgagcagtgagagctgcactcgaaatcctcggcttctgggcccggatcgcccccgctcgcctccattgcagagatccccggcccaggcccgaagtccaccgtgccgctgcctcggacctcggcggccagtcctgccgagccggcggcggccgtctccatgctctccatctccagtacctgaagagatgcagccgcggccgccgccgccgccgccgccactgccgcagccgccatcttgacgccgctgcgcccggcctccacagcctcggaacgatgcggctgttggtacgacacagagggattctgggattaaatagtgcgcgcggggcggggccaggtcgcccgccggccgcacatgcgccgcctcgcctccagcagcgccgcctcgcctccagcagcgccgcctcgcctccagcagcgccgcctcgcctccagcagctctgcctgccttggtgaggtccgtcagtaacagtcgcccagtccagaagacttcgccccaggcctacccccagggcgtcggtgcgagtatggctcgcttcctttccttagtgggtagcatgctctctgcagtcattttgtcgagtaaagccaccttagaccatcacctgttgttaaagccttgagtggcaatacaggatttttataagatctagccccagctaagtggatgagggatgaatgagttactcgttatccgtttttttttttgtttctttttgtttttgttttgttttgggttttttgttttttttttttttgagacggagtctcgctctgtcgcccaggctggagtgcagtggcgcgctcttcgcttattgcaacctccgctgcccgggttcaagcgattcttgtgcctcagcctcccgagtagctgggactacaggcgcccgccaccactccaggctaattttttttttttttttttttttgagacggagtctcgctctgtcgcccaggctggagtgcagtggcgcgctcttcgcttattgcaacctccgccgcccgggttcaagcgattcttgtgcctcagcctcccgagtagctgggactacaggcgcccgccaccactccaggctaattttttttttttttttttttttgagacggagtctcgctctgtcgcccaggctggagtgcagtggcgcgggtctcggctcactgcaacctccgcctcccgggttcacgccattctcctgcctcagcctccggagtagctgggactacaggcgcccgccaccatgcctggctaagtttttgtatttttaatagagacggggtttcaccgtgttagccaggatggtctcgatctgctgacctcgtgatccacccgcctcagcctcccaaagtgctgggattacaggcatgagccaccacgcctgaccgtagatgagcatttttaaaaccatatatactgaaactattagtacagttcaggccaggccaggcacagtggctcacgcctgtaacagcactttgggaggccaaggaggatggattgcttgagtccatgagttccagaagagcctgggaaatacagcagaaccttatctccacaaaaaatacaaaagttagcctggagtggtggcatgctcctgtagtcccagctacttgggaggctggagtgggaggactgcttgagcccaggagatggaggctgcagtgagctgtgatggtgccactgtactccagccctggggcgacagagtgataccctgtctggaaaaaagtacagttacaaaggaatacagatcaaaggatatggatgccaggagccagcagtatgccttcattgttactatatagtttatttaaaccagactatgataatacagagaagagactgaggtggcagctgcccagaatctttgtggattacagatgcaaagtagttaggagtccttggacccacacttcagttacagacagacaaatcagctgcataaatacagagaacataagacacaagacatttcacagctttctgcatttccattttaaatgtatgtatgttacaactttacatattaagttactactccacatattttgtgacaatggctaaggatgcaatggccccatccccctgacataaacagactctggtctgcaacacagaacatttcagtgggataccaaacaagcccttaacacgtaacatacaaaaagatctttaaaaatcagattaatacaatgttcttcatgttatataaggaagaagaaagggaagtaaaaaaaaaaaaagagagacattggggtgctttaaatgtatagtatcttgaggccataaatgtttcattcccttcctccaaaggagaaaaaaatgtttaactaatggaaaaagaaagcaacatcctaacgccctacaatgaggaagaccccatcctgacagtacttagatgcttccatataataaatacagcaggtagcagagcaaagtcacaaatattggcttggtttttatttctatgcttataaaaaaaatatgaagcttctttgtgtggactgaaggggtgttagcctgtggatgttggtcttcggtgcctgtaccccagtggctgtttacattccaggcccctgctaaataaagcaggctccactgccagctgtctgtacactttttcttgggggaagagatcttgtcttcagtttactgcagtagggttcctggctctgttacatgctcatgtgttccggaagaacatatgaaatatcatcccacggatgacgatacagcccctgcttcagcctcttctgatcaagatagtgtcctaaaatgaagcaaacacatcttttttattagagcttcataagcctggtgagaggaagaggctaaggaagggaaatctttctaacacacaaaaaaagtagacacaaagcagtgggaagtttagtccaaatccactgtataggtagatgaggcggactttgtacaagggagctgctggatctgattctattttcctttaaattaaaacaaaattttaaagggaaaaaataaaataaaataaataataaaaataggccgggcacggtggttcacgcctgtaatcccagcactttgggaggccgaggtgggcagatcacgaggttgggagatcgagaccatcctggctaacatggtgaaaccccgtctctactaaaaatacaaaaaattagccaggcgtggtggcatgcgcctgtagtcccagctgcttgggaggctgaggcaggagaatcgcttgaacccgggaggcagaggttgcagtgagctgagaccgcgccactgcactccagcctggtgacagagcaagactcagtctcaaaaaaaaaaaaaaaaattttcctgggctagcaatcatttctaagaacaaaggaacaatgataaagataaggggaaaggttaaagtaagaaaggaaagattaagaacaatgattaagaggatatgacatttcttctgtagaaactgaaccacaaaaagaaaattaaaaaaaaaaaaaaagaaagaaaaagaaactcaaccccatgagtaagtggtgtagctgaaccgtggggtttaaaaaaaaacacttaaaacaacaacgaatggactcaccaatgaaccccatactccttcccagcacaaagatgccattgagggctccaatgtcaatatattcatcagcttcctccctgcaacacacatcaacttgtagttttaaaaggctcacgtgactgccctcctccccacagacagtactactactgcccaagaatgagaagaaaaggggtgctctgggtggtagcattacaggcaatttttgttttcttctttatacctctccttatttttcaaatattctattatgagtatgcattacttttatagtttggaggaaacaacaaaaatcaacaaacgtaatgaagaagaaaacagctacaatgctcaccgagtaaaggacccacagtttctaagcatgtctacaaatgcgactccgatgagaccatctacattcaggataagatttggcttctgggaaggcaaaaaaattcaaagcatttatcattatttctcattttttcttcataattttccactgtcactactattactacgaattgtgaccatcatttaaaaaccttctaccagccccactggtcgacactgtgtctgactcagttcaattcccagcatctagcaaagtacccaacacctagttgacatttagtgcatgtctgttaaatttagttatgaaacaaaaataacatttctagaaaactaggtttgcttttagctgcataatcaaaatgtaacgtggctcctgtttcctccaataaacttgtccaacgtgagggaattaggaagttttttctttgttaccttcgaggtggtaatcttctctacttccagtgcataatcgagcagaggagtggcagggaagtgctgcctgacgtaatctttgaggatctgcactcgcatgtctgggttgtttatctagaaatgaacccaacggtacagaggaacactcacacactgctgggatgtgtttgttcatacttgtgttacaggtaggtagaactggacatatcccagcggcgattcaggaacctggcccacgtgtaccattccatgtggcaccaattgtgctaatgccatgaggctggcttttgaagtcctctcatatctcaattgggacacaaaacaaccttggtaggttctcacttttaagttgcaaagaagaaactgagccctgagatgttcagggaactggccaggtcctacagtgttgagcagcagaggtctgaaagttaaccactctccaactcaagagtcttaggttccagcctccagccatgcccccgccagctctgtgcctactcaagctgtgacaaagttcaacactaaacaaacacgtgtttagtgtggggaggcaaagtattcccaaaattttagggaaaactctagacctgctgtgaatgaaattaaccacctgtcagttggggaggaagatgatctagggacataccaaatcgaataccaaagcaacttcagccctcagcaaaagagatagctgggtcagtacatcctctagaaagcggggagctcaaagagtgaatgagtgagtgtggagtgcaagtctagcattatcttagaaagaggctctgtgctgtacataggcatgttgttatatgctcaggagctggggctggctgagcaaagtcaagcaagtcctggatggaatgtccctcagagccacccaccttccctgcttggttctgagctggtccttgctcatcaagcaacctctgggtatcacctgagatggccaagtgtttggctgcctagaaggtggtgtcctgaatcacatgcatgaccttcatgttaatactccccacctaggccagtggagtgaccaaataaatgaggttgctggagctacagagccaaggagcccagggtaaagggatctgctaaggagctgtccccataaggccctgagcagctgccagtgacctcatctcttgctctttggtttctaaccaaagcacaatataaggacatagaaatgaccggccctgtgtgagactatataaactgtttcaaatatttactgtcctttcccactggtctctcccaatcagatatgccttgatattgtcactcttcctgccccagtgatgtcacaaataaccacttgacttgcggtggccaatgaaatgtgagtgaaggtgaatcatgtaaggctttaagagcctgcacgtggtcctgccattgctgttatcctgctgacgtgaggccagcacatcccagacggcggctgttctttcggcacagatggcagagaacaggcacagcaaaccctcagtggatgtagtgtgaatgagacataaacctttgctgtggtaagccactgagatttttggagttgtctgttactgcggaatgaggtattatctagccgaaggtgaccaatatgtcccctcaacctgaccttggcccttttacccataagattcatttgggaaaccaaagttaccaagttttccatctcatttcaactgctatttccatactgcaagcgaacgacagaaaaactgttaagggcaatctgtattataacatggaaaaaatagctgctttgtatttggcatctgtcaacacatccaaagctttgtatgttggagttgaaagcttaggtattctcccaaataaattaatgcccccactatcaccacccacccagtagatccatcccacttttttttttttttttttgagatggagtttcactcttgttgcccagactggagtgccatggcacaatctcggctcaccacaacctccacttcccgggttcaagcaattctcctacctcagcctcctgagtagctgggattacaggcatgcaccaccacgcctggctaatttttttgtatttttagtagagacggggtttctccatgttggtcaggctggtctccaactcccgacctcaagtgatccacctgccttggcctcccaaagtgctgtgattacaggcatgggccaccgcgcctggcctccatcccacttttttaggagagtaacaactcaccgacttcactcggtgaccaatgcccatgatcagcttcccttccttcttcatcttgttcacaaactccatggggataatgccactgtcaaaggctttactgaacatcttggctgctgcatccaaggcacccccaaaccgatccccctggaggagaaacaagtgcgtgttgccttgagctttaagagtttccttcagctgggcaaaccaacccagtgtgtcccgaacggccctgagcactgggttttacactcaggggctccttctagggccctgctgtggcaaagcagcatgaggccaaggcccagtgtccccactgttcacctcccatgatgacagtacttacgatggtgagcagccccgaggtgaggctggagaccaggtctttcccagctcgcgcacaaatgatggtgttgtgggctccagagacggctggcccgtgatcagctgtcaccatcagacacatctcaatgaactggcaagagtacttaggcaacctggagtggggggaacaaaggccaggagatggtcgacaaggccatgctcgtactttcccccatctccctaaacaagtcattcaaatccaagaagggtaactaccaatccaagtctaatactaccacacaactctaaggcaaaacctcctgattcttttctttagacagagtctcattctgtcgcctaggctggaatgcagtagtgtgatcttggctcactgcaacctccacctcctaggttcaagcaatttgcctgcctcaacctcccaagtagctgggactacaggtacgcaccaccacgccaggctaatttttgtatttttagtagagacgagattttgctatgttggccaggctatctcgaactcctggcctcaagtgatctgcccacctcggcctcccaaagtgctgggattacatacaggcatgagccaccgcgcccggccccaaatactgtttgtaaaacagagtttgaaaccagagttttgaatctattctttgatcagtgattttcagcatgagttgcctgtaccaggatttgacctgtatttgtggctatgctccatgtgccagactgacaggaggtgagaaccctgtcccttcacagtgtaggaggccccatgcctcattcctgtagtattcaacctcccaactaagaatcaggaacaaagtatggagaggtgggaggcaggagcagacagagagagacctgctcaggtgttataacccgtgaacttttcccaggaagggtccaaagcaggaccaagacccatctctctgcaggtgagggcatgacacaaccaaagacattgacctggccttctgcccagcatcacattaagcccagggctctgtgaatcacatactcactggctcccctgcccagccgtcagtcccacgggagggctaagattgggagttgcagagaaaaccaattttttctaacattcaagctgatgggagaaacaaatttgcaaagtgaacacaaggtacttttttttttttttttttgagacggaatatttttgctcttgttgctcaggctggagtgcaatggtgtgatcttggctcactgcaaactccacctcccgggttcaagtgattctcctgcctcagcctcctgattagctgggattacaggcgtgcaccactatgcctggctacctttttgtatttttagtagagatggggtttcaccatgttggccaggctggtcttgaattcctgacctcaggtgatccactcacctcggcctcccaaagtgctgggatgacaggcgtgagccaccgcgcctagcccataaggtactttctatctgttcagcagctccaccaggcccacactccttaggccaccacatctttccagttctctcctgcctaacctctatcttgctgtcaagagatctgcatttggttgggtgcagtggctcatgtgactggactttctgtccttggaagacttaggaatagtttatgtgtccttcctctggccgctcaattgacctgtggccccaaagattgatcttggacacactccccaggcctgtccactcccacccctttgttgggggaaaatcattaactctgagctgcagggccctgtaatcttctgccctccatgctcaccttttctggaaccagaggaggccgaggaccccgccaatgcccatctcttccttgaagacctcagtgatgggcatgcccgcgtagatgagctcctgtcctcgctcatcgcagatgctggtcatgaacgaggcaggtttgcggatcaaaccaagctcctgggcagagatggggaagagggaagcagggccctggtgaccaccacagatttttccaggactgccctgctgtgtgtactctcagaaccaaagcaccccaggaatgtcgtaaactctggcagccaagtaacaactctcaaagttttcccaagaaagaagtgcaaaagccctttcattagatcattttggacatagaaaacaggaggacccatgacaccacttggcatcagcactatcagctctatttctatccttccctgagcatttgctgggctaggaaatagcctaagcagttcatatccattgcttcatttctggagggggaccagagtctctctgttgcccaggctggagtacactggtgagaccatagctcacttcagcctcaaactcctagctaggctcaagcgatctgcccagctatgcctcccagtagctggggcaacaaggcacgcaccgccacgcctggctaattttaaaatttttttgtagagacagggtcttgctatgctgtccaggctggtcttaaactcttgtgctcaagcagttctcccacctcagcctccccaagtgctgggattacaggcgtgagacccagtccattgcttctttttttttttttttttgagacgcagtcttgctctgtcgcccaggctggagtgcagtggtacgatctcagctcactgcaagctccgcctcccaggttcatgccattctcctgcctcagcctcccaagtagctgggactacaggcgcttgccaccacgcccagctaattttttgtaattttagtagagatgaggtttcaccgttttagccaggatggtctcaatctcctgacctcatgatccgcctgcctcggcctcccaaagtgctgggattacaggcgtgagccactgcatccagcccattgcttcattttaacctcacaaaggagaagcattccttgtgttatagcaaaaaaaaaaaaaaaaaaatgaggcttagagaggctcagtaaccagcccaaggtcacctgggtaagaaatggtaaaatgaatccaaagggaaaatcttacatacacttcagatatagctgccaaccataacaataacgtaatggggcagggcacagtggcttatgcctgtaatctcagcactttgggagaccaaggcaggcggatcacttgaggtcaggagttcgagaccagcctggccaacatggtgaaaccccattatctattgaaactacaaaaattagctgggcgtggtggtatgtgtctgtaaccccagttactcgggaggctaaggcaggagaatcgcttgaatctgggaggaggaggttgcagtgagcagagatcgcaccattgcactccagcttcagcaacaaaagtgaaactccgtctcaaaaaaaaaaaaaaaggggggacgagatacgtggctaaagaaatgggggagcccccctccctctccctctccccacggtctccctctccctctccccacggtctccctctccctctccccacggtctccctctgatgccgagccgaagctggactgtactgctgccatctcggctcactgcaacctccctgcctgattctcctgcctcagcctgccgagtgcctgcgattgcaggcgcgcgccgccacgcctgactggttttcgtatttttttggtggagacggggtttcgctgtgttggctgggctggtctccagctcctaaccacgagtgatccgccagcctcggcctcctgaggtgccgggattgcagacggagtctcgttcactcagtgctcaatggtgcccaggctggagtgcagtggcgtgatctcagctcgctacaacctccacctcccggccgcctgccttggcctcccaaagtgccgagattgcagcctctgcccggccgccaccccgtctgggaagtgaggagcgtctctgcctggccgcccatagtctgggatgtgaggagcccctctgcctggctgcccagtctggaaagtgaggagcgtctctgcccggccgctatcccatctaggaagtgaggagcgcctcttcccggccgccatcccatctaggaggtgaggagcgtctctgcccggccgcccatcgtctgagatgtggggatgaggagatcctctgcctggcaaccgccccgtctgagaagtgaggagcccctccgcccggcagccgccccatctgagaagtgaggagcccctccgcccggcagccaccccgtctgggaagtgaggagcgtcttcgcccggcagccaccccgtccgggagggagatgggggtcagccccccgcccggccagccgccccgtccgggagggaggtgggggggtcagccccccgcccggccagccgccccgtccgggaggtgaggggcgcctctgcccggccgcccctactgggaagtgaggagcccctctgcccggccaccaccctgtctgggaggtgtacccaacagctcattgcgagcgagccatgatgacaatggcggttgtgtggaatagaaagggggaaaggtggggaaaagattgagaaattggatggttgccgtgtctgtgtagaaagaagtagacatgggagacttttcattttgttctgtactaagaaaaattcttctgccttgggatcctgttgatctgtgaccttatccccaaccctgtgctctctgaaacatgtgctgtgtccactcagggttaaatggattaagggcagtgcaaggtgtgctttgttaaacagatgcttgaaggcagcatgctggttaagagtcatcaccactccctaatctcaagtacccacggacacaaacactgcggaaggccccagggtcctctgcctaggaaaaccagagacctttgttcacttatctgctgaccttccctccactattgtcctatgaccctgccaaatccccctctgcgagaaacacccaagaatgatcaatacaaaaaaataaaaaataaaaaaggaaaaaaaaaaaagaaatgggggagcccttcaatatgtcttttacccaggggacggggactgaattcctgaatttcccatttccagagttgaggcaaatcagccaatttagtccaatcctatttctccaattatcctctatgaatttttaaaatgctttacagttacatttttattacaaaaacaacatgaatatgttctctatctctctctctccttttttttttttgagacggagtttcgctcttgttgcccaggctggagtgcaatggcacgatcttggctcactgcaacctctgcctcccaggttcaagcaattctcctgcctcagcttcccgagtagctgggattacaggagcccaccaccgcgcctggctaatttttgtattttttcagtagagatggggtttcaccatgttggccagcctggtctcgaacttttgacctcaggtgatccgcccaccctggcctcccaaagtgctgggattacaggcatgagccaccaggcccagccctttttttttttttttttttaaattacagacagggtctcactctgtcacccaggctggagtgcagtggcacagtcatggctaacttcagccttcaactcctggtctcaagcagtccttccaccttgacctccaaaagtgtcaacttgactggattgagggacacaaagtattaatcctgggtgtgtctgtgtaggtgttgctaaaagagattatcatttgagtcagtgggctggggaaggcagatccacccttagtgtagtgagcataatctaatcagcttccagcaaatataaagcaggcagaaaaatgtgaagaagagagaccagcctagcctcccagcctacatctttctcctgtgctggatgcttcctgccctcaaacatcggactccaagttcttcagttttgggactcggactggctctccttgctcctcagcttatagacagcctattgtggtaccttgtgatcatgtaagttaatacttaataaactctcctttatatatatatatcctattagttctgtccctctaagagatccccgactaatacagaaggcctggtttccaagagttcaaggcaaatcaacgcgaaacccaccaccatagacccacagatctcccttgctcacactgttagagacatttaaggcacctaccctggcccaggagtagtccatgggcacggttgggggcggcacctcctgggcaggtacaatgactccattggccacgagatcttcgtatacagacctgggaggcaggaaaaaaaagacatccatgtggattttcttattttgggctcctgtaagacatcccaagaatgctctatctaacccaaacactgtaggtttcttagtttactcttacctgctgaattctgagaactaaatgaaaagaagttctagccaagactgcacctgccctctgctccctactacctcatgtcccaatctctggatggcaaggaaggacacagccgggagtccaggcaggtttaagaggtagaaatgggaagagatcacaggatatctaataactctctatcaatcatagataacactctctaaacattttcatgtggcgctctcatctatggctgccacctcccagccaaataggtaggctcagaaactcaacacattttaataccagcctagacctactgcctccacaaactaaataaaacaaaaggaaagccaaagagaaagaggattttgaaccatccatacagctgcgctagacaccgagagggaccaggaatacatgatgtccctgtgtgggagaggctgctgtctcaggagggatttggaaaggagggggaggccggcatcctccccaaggtccacttactggatgatctctccaagctcatcaaagctccggggcacaaacactcctgcttccttcaaagcctggttcttggctactgcagtttcagaagcctggttggcacaagctccagcatggccaaactggacctggaaagcaaaggaaagtagctttactgctaatcccccaagagtgaacatagaatcccatgtaaagtgtgctaaacactttacatgaatcacttcatttaagcctcaagcaagctcactgaataggtacaatagatgatttccattttacagacaaggaaaccaaagcacagagaagttcaggagcttcctcagggtcacgcagctaaggtgcatggaagtcaggatacaaagactggcagcccaactccagaatcaccttcctctgcctcctgggttccagcgattctcctgcctcagccacccgagtagctaggattacaggtgcctgccaccacgcccagctaatttttgtatttttagtagagatggggtttcactatgttggccaggctggtctcgaactcctaacctcaggtgatccaccagcctcggccttgcaaagtgctgggattacaggtgtgagccaccacgcctgccccccccgccttttttttttttttttttttaagtgacagggtctcactctgtcacccaggcaggagtaaagtgatgcagtcacggttcactggcaccttggcctccttgggctcaggtaatcctcccacctcaacctcctcaatagctgggactatagatatgtgcccaggaggctgaggttgcagtgagccaagattgcgccactgcactccagccagggtgataagagcaagactccgtctcaaaaaaaaaaaaaaaaaaaaaaaaaaaaaaaaaaaaaaaagaagtgctaaatggtgtctgtgtcttttctttctttcttttttttttcgagacagggtctcgctccagttccccaggctggaatgcagtggtgctatcttggctcactgcagcctcaacctcccaggctcgggtgattctcccacctcctcccgtgtagctgggactacaggcgtatgccaccacaggtgtatgcctggctaaaagttttttgtagttttttagtagagacagggtttcgccatgtggtccaggctggtctccaactcctggactcaagcaacccacccacctcagcctcccaagctgctgggattacaggcatgagccagcgcgcccagcgtgactgagtctttaatcaagcgatggaggaaattaacccacaagacatctgatgcaaagccttgtcttaggatggggtgcagagagtaatcatagtactatctaacctgtttacataacactatgttcaggcacttttctaagagttttactcattcaatctcagtagctatgatcgtttcctataaaaaaggaaatgggagcacagatgggtaaagtgatttatcccaggtcacacaggtagcatgtggtagcacttgaacctaggcaatctggcctcagcctgtgctcttcaccatgcaaacagaacaaaaaggtgaaaaggttaggaactgctgctctgtaagcaaaggttgaaagacaccttaaagcgtgagttcccaatgcgttctttgtaggatttaatctgcatcggcagatgggtgggaagaagagagtctatactcagaaaccctaggtttaaagaagttaagtttcttgtaactctggatttctcaaaactaaaaacaaaatttctaaaagggagatgaattatttaaaaaacaaaactaaagggctgggcgcagtggttcacgcctgtaatcccagcactttgagaggccgagatgggtggatcatgaggtcaggagactgagaccatcctagctaacggtgaaaccccatctctactaaaagaatacaaaaaaaattagccgagtgtggtggtgggcgtctgtaatcccaactacttgggaggctgaaacagcagaatggcgtgaaccccggaggtggagcttgcagtgagccgagactgcaccactgcactccagcctgggcgacagagcgagactccgtctcaaaaaaaaaaaaacacaaaaacctaaaataattcaaggacccaccccacccatggggcgatgagtgccaccagatactgaaatgcgaggtgctcaccctcttagaagtgtcctgatcatggtggggatggggaggtggggtggaaagggggaggggctggtaatgcaaagcaagccaggagaaacaatggaggagggtgactggtttttggctgttgggcgagtacagagttggggggagagcaatggagttgggggagagcactcaagaagaaagagaatcggctgggtgcggtaactcacggctgtaatcccagcactttgggaggccgaggcaggtggatcacctgaggtcaggacttcgagactagcctggccaacatggtgaaaccctgtctttactaaaaatacaaaaattagccgggcgtggtggctgttatcccagctacttgggagactgaagtaggagaattgcttaaaccagggaggcagaggctgcggtgagctgagatcgcaccactgcactccagcctaggcgagagactccgtctcaaaaaaaaaaaaaaaaaaaaaaaaggagaatcaggaacagcttcatggaataagcggactgacaaggcatgggaaaaaaaagaagtttctaagacctatgcacgccagacctttacaattacttcctcatttaagtcatacaacaaccttgcggcatggcatcctcattttacagctcaggaaacagttaccaagaggctaaatgacttgcccaggtctaccaagatctgattttaaagatctgatctcagctcactgcatcctccgcctcccaggttcaagcaattctcctgcctcagcctcccgagtagctggcattatatgcccctgccaccacgtctggctacacagatctaccaaggtctgattttaaagcctgtgcaagcagagctcaccctggagggatgggcaggattctggacctctcctccccttttacttacatggaaaaataaaaaataaaacccacatacacacacactttacacaaaatggatattataagcatttactgaactctgccctttcttacaggtaatgtatcttaaactctttctgtatcaacatatcaagttccacctccttctttgcatgcctgccctgttttccattagtttgtggatatgccatgctgacagtcccctcctgataagcatgtaagttgtttccaggccaggcatggtggctcacgcctgtaatcccagcgctttgggaggatgaggcaggcagatcacaaggtcaggagctcgagaccagcctgaccaacatggtaaaactccatctctactaagaatacaaaaattagctgggtgtggtggcatgcgcccataatcccagctactcaggaggctgaggcaggagaatcatttgaacccaggaggcggaggttgcagtgagccgagatcacaccattgcactccagcctgggcgacagagtgagaccctgtctccaaaaaaaaaaaaaaaaaaaaaaaaaaaaaagttgtttccagtttttgctgttaatgatactgcagagtattcttgtacacacaccaggtacccggcttttccttcaatttcatcatcatcacgtgagccaccttcaaggtggtaaagggttctctaagccgaagcacaggggctgaagtctggcgtatgatcccccagcagaagacagatagctcagaagcttagcagacagcagaagcccaaggagtgtttatattcaacaccatcaggtgcgccagacactttcaagtacattttatcattttaacacatcaagaacaaacctttccttctaccacctctccccacacaaaacatctcaccaagccccgcccagctgagcccaggctgtgtccttctccctccttggcctccctttcatcagcaaagcccttctcatcccctaaactacagttcaaacatcaccttctcagggatgccatctcaacttctccagacagctggttgctacctacgccaagtagggactcagagcctgactgtagctttaatctgcttataaattggtctcctccaactggatataagctcccagagagcagggccctggctggactttgtagtaaccaagcaagtaacaaacgtttcttgaaggaactagctgcgaattaataagatgattacctggttcgcctcaaatgccccctcttgcaatccccactcccagcccagaagtgacccatctcagccatacctcagaggagaacatggtggcacacgtcccgatgcaccagcagacgatgggcttagtgaggcggccctccttgatgccccggcaaatcttatattcctcagtgcccccaatctgccaaggaatggggaatgagaaaaagccaagttagtgcagcccatcctgacgtaaaaactggatagaaaatggagtgacacgggctttggccaaataaaaggagtttaatttcagcctggacacaaggaagatttctaaaggaacaaacagcaggtctcctagaggaatctctgggactcccccttcctaatctagaaatataacatgatttaggattagacctgccttcagaggtgcaaacaagggatggggttatgggactcccaaattttttagtatttagaaaattttttttaaccgttctatccaaaagtcatcacattttttaaaaagcgctttttttttgcttttttttttttttttttttgagacggagtcttgatctgtctcccaggctggagggcagtggcgttatctctgttcactgcaacctctgtctcctgggttcaagtgattctcccacctcagcctcccgagtggttgggattacaagtgtgcaccaccatgcctggctaatttttatatttttagtagagatggggtttcaccatgtaggccacgatggtctagaactcctgatctcaagtgacccagttgcctcagcctcccaaagtgctgggaggattacaggtgtgagccaccatacctggccaaaaaaatgcactttttttactccagctttccactgcccaccaggtagagaccatggccagccagagcagagcttctctcttattggcgctaaagtttgggatgctgggagattaagaactcccttctctgaaacataaatggcagtactaatagtgacaaccttgaggccccagcatctaggggatgggattaccagggactgtccctttaagttacatgtaaccaaaatgttttaattttttgaaaactgagatcatgcattacagttttaaaatcataatttttttttttaaagtaactcacctctccaagaaccacaatcattttgactcctggagtgtcctgatagcgtaacacatgatccatgaatgtggagcccgggtacctgttgagagcagggagtatcaggatacaggatcaggaggaggcctggggaagtgtgtacagggttaggaagcacacttgtactgggtacactggattttggggggatgtggatggccagtaagggtccagagatgccccagcaataatggacaggggaaggtagcaaatggaacagaagagaagaaagagggaaggagttggagctatttaacttgcaaaggaaaagactgggcacaaaataagcccagagaggttcgctcagcagtaagagatgacttagaaagtacgccctggtgcagttgttttaaaatatatccacaaattccggccaggcgcagtggctcacgcctgtaatcccagcactttgggaggcccaggagggtggatcacctgaggtcaggagttccagaccagcctggccaacatggcgaaaccccgtctctactaaaaatacaaaaatcagccaggtgtggtcgtgggcgcctgtacagtcctagctactcaggtggctgagacgggaggatcgcttgaattttttgatcgtctcaaaaacaaaaacaaacaaacaaacaaaaaaaacctaagaacacacacatattttctttctttctgagatgaagtcttgctctttcacccaggcttgagtgtagtggtgcgatgttggtgcactgcaacctccgcctcccgggttcaagcaatcctcctgcctcagcctccaaagtagctggcactactggcacatgccaccacatccggctaatttttttttggtagagatgggggtctctaccaaattcgagactgtgttgcctcagctagtctcgaatttctgggctgaaacaatcctcctccctcagccccccaaagtgctgggattataggcataagccactgttcttggcctcttcatgtcttttgatatgatcattataaatctaagaagacaatctaaacaagcagcatttcctagacttattccctgagcctttggtcaggcagtacccaaggactggggattcccaggctacacccctaaagaccttggtgagagttcttcctcacccaggcatcctatcggaaatcatgtggtagagccagggagacgaacaaggtgactctatctcaacagcttttggtttctaagcccgacagcagtagtaatagtaggaataataaacaataatggctaacatttattatgaacctactaagtgccagacgttactctgagatataatactgtattcatgacctactgatcagtgttcccactaccaaaaataatgaggatactattattaactacaataaaaactcactgagcacctgctgaacgcaggccctggctcagacacttatatgtattacaattcatttattcctccagtagccccatgaggtgggggtattatttacccatttgatgtgtaaaaatgatggaggtctagggaggttaagtaaccggaccaggatggcccctgccacccaccccctactaaagagggaaaatgggatttgaacctctttagtccaatttcagaactggccctcctaaccactgtactctgctgcctccctatggccaatcacaacaaacagaattatccccaaagcccagtcgcccctcctgcacattgttgccctgttctgtgttttccgatttcatgctctgtcagtcctgagacaagagcagtgatgccccattgtttagacttcagcagcattcctgcgggcctggaactcaggggcagcaagcagcctgcaggacacagcatcgtctcctagcccactgctctcaaagcaggaagcccctccttggcttcccagctgattacctgtccccaccaatggccacgccctcatagacgccatccgtggtccgagagatgatattgttgagctcgttggacatgcctccggaacgtgagacataggccacgctgcctgggcggtacagtttggaggccaggatgttgtccagcatcccacctgtgttgccaatcttaaagcacccaggcttgatgcctccaacctgtgggggcagaaaccacaatcagggaggaaggtgacttccagattcaccacaaagaatcacaaagcccctgcattactgcccagccccttctggccaggctggggagagaatgaccaagagaaatcacacttgcccactgggtttcctgcttaggaaagtctcctctctctctcaagagacatacagaacaaaagagagccttatttgtaaagcatggctcactaattcaggttcagatacgtatacttggcccggcacagtggctcaggtctgtaatctcagctctttggaaataaatactagctccatttttttaatacagtaagaagtaaaaataagccaggtgtggagaacacttctggaatcccagctactcaggaggctgaggcagggagattgcttgagcttaggagttcggggctgctgaagtgtgttataactgcacctgtgaaaagccactgcactccagcaacacagcaagaccctgcttcttaaaaaaacaaacaaaaaataattcaaagaataatttcagccaggcatggtggctcacgcctgcaatcccaacacttttggaggctgtagggggcagactacctgaggttgggagtttgagaccagcctggctaacatggtgaaaccctgtctctactaaaaataccaaaattagccaggcgtggtggttcacacctatagtcccagctcctcgggaggctgaggcaggagaattgcttgaaccaaggaggcagaggctgcagtgagccaagatcgtgccactgcactccagcctaggtaacagggcaagactccgtctcaaagaaaaaaaaaaaaaaaaaaaaaaaaaaaaaggccaaacacggtggctcacacctgtaactccagcactttgggaggccgaggtgggtggatcacccgatgtcaggagttcgagaccagcctgaccaacatggtgaaatcccgtctcgactaaaaacacaaaaattagccggacatggtggcgggtgcctgtaatcccagctacttgggaggctgagacaggagaatcacttgaacccggaagcggaggttgcagtgagccaggatcgcgccattgcactccagcctaggcattgcagtgaggctgtgtctcaaaaaaaaagctaaaaatggacagactgattttcaacacatacttcctgaatcttctcaacctaggagggagatagaggagtcaaaaagtaaacttcctaagggcattgaacttcataagatagcatcgaacgtaaaaggctttccggaggggaagctcacagtggcaggtccgatgatggtcactcccttctggtccgccttcttgatcagctttctcgtgagggcctcagggatgccttcagctatgatggcgatggtccggatctagaggatgacaaaagtcccttcctgttaactctctgcctcagaaagggcaacaagacagcaccgtttaagggcccacctcccattccacatgtcctcttccagggtccaagaacaaagtaatgttaacaatatgcatatcagccgggcgcggtggctcatgcttgtaatcccagcactttgggaggccgaggagggtggatcttctaaggtcaggagttcgagaccagcctggccaacgtagcaaaaccccgtctctactaaaaatacaaaaattagctgggtatggtggtgcgcgcctataatcccagctactagggaggctgaggcaggagaactgcttgagcccgggaggtggaggttgcagtgagctgagacggcaccactgcactccagcctgggtgacagagcgagactccatctcaaaaacaaaaacaaaacaaaacgaaaaaacaaaaccaatatgcatctcattcttcccacaggcctctgctcgtaatcactctaaccatctcctgaaaacacaagtggtggatagccgaaactgatctccactagctaacaccacagtgatccacccaagagaggcaggtatttcggaagccctgctacagtcatagcagctacgttcactctcacccaaaagctcacaccctcctgttgtctacctgttcctgtgcctgctcataaagcagctatctaaggcttttcttcatgggaccctccgagtcttgtcaccatccccacaggacagggtcagcgtttaagagaaatgagctgcttctacactcagcccagaggcggggtgggaggggcatgggacagatccaggaatcacttctctttggctctaaaccagggccagcaaacttctgtaaagggtcaagatagtattgtaggggccaggtagagtggctcatgcctgtaatcccagcactttgggagtctaaggcaggtggatcccttgagcccaagagttcaaggccagcctgggcaacacagggagacccggtaggaggatcaattgaacccaggaggttgaggctacagtgagttgcatgattgcatcactgcactccagcctgggctacagagcagtatgtgtgtctctttaaaaccaaacaaaaacccctggctgtgcgcggtggctcacatctataatcccagcaatctgcaaggccaaggtgggcagatcatttgagattgggagtttgagaccagcctgaccaacatggagaaaacccatctctcctaaaaatacaaaattagccaggcatagtgatgcatgcctgtaatcccagctacttgggaggctgaggcaggagaatcacttgaacctggaaggcagaggttgcggtgagccgagatcacacaactgcactacagcctgggcaatgagagcaaaactctgtctcaaaaaacaaaaaacaaaaacaaacaaacaaacaaaaaacagccctaaaactaggtgatgtgctaggttttgccttgggccatagtttgccaacctctgccctaaactaaagaagcagcagccggacgtggtggctcacgcctgtaatatcagcactttgggaggccgaggcggttggatcacctgaggcctggagttcaagaccagcctgatcaaaaaggtaaaatcccatctctattgaaaatacaaaaattagctgggcgtggtggcaggcgcctgtagtcccagctactcgggaggctgagacaggagaattgcttgaacccgggaggtggaggttgcagtgaactgagatcacgccgctgtactcactctagcttgggtgatggagaaaggctccatttcacaaaaaaaaaaaaaaaaaaaaaaaaaaaaaaaagaagtagctcattttcagcaaatgtattttttcacttcctctaggtatcaagacaattttatattctccagtcataaactgaaataagccagtctgggatcagatgataattttcaacaaaataatcaatatcctaattttattttttttgagatggagtctctcgtcgcccaggctggagtacaatagcacgaccttggctcactgcaacttccacctcccggattcaagtgattctcttgcctcagcctcccaagtagctggcactacaggtgtctgccaccatacccagctattttttttatttttagtagaggcggtggccaggctggtctcgaactcctgacctcaaatgatccacccaccttggcctcccaaagtcctgggattccagatgtgagtcaccgcacccagcctcaaacctgcaccttctgatgcagtagttcaacttctagaaatttatgcttagggaataattaaggatataggcaaatgttaatccgagattgcccatcacaagatttgcaaaagcaaaagtgatgctgccagttagtgcttactgatgtggaaagagcaactgaagaaagcagattatatgagtggcatacagtattattccctttgctcaaatctagaaaagggggtagataaggacataccgtcatagcagcagtcatgtttttctgaaatgggacctcaagtatttattttcaacaaaacagtatttatcagtattttgaaactgttctataataaatatgtaatatttttataatgaaatgttggagtctttctgagcctcctctggcttgggaagctgaccgattgaaaaaaaaaaaaaaaatttgccgggcgcggtggctcacgcctgtaatcccagcactttgggaggccgaggcgggcggatcacgaggtcgagagatcgagaccaccctggccaacatggtgaaactccgtctctactaaaaatacaaaaaaaaaattagccgggcatggtggcaggcgcctgtaatcccagctacttgggaggctgaggcagaagaatcacttgaacccgggaggcggaggttgcggtgagccgagattgcaccattgcactccagcctgggcaaaaagagtgaaactctgtctcaaaaaaaaaaaattttttttaattaaaataggccaggtgcagtggctcactcctgtaatcccagcactttgggaggccaaggtgagtggatcacttaaggccaggagttcgagaccagtctggccaacatggtgaaaccccatctgtacaaaaaaaaaaaaaaaaaaaaaagccaggtgtggtggcatgtgcttgtaatcccagctactcagaaggctgaggcacgagaatcacttgagcctgggaagtggaggctgtgtgacagagtgaggccctgtctcaaaaaaaaaaaataaataaatacaaacatacataaaataaagtgctttaatcctgatttgtttttttgtttgtttttgagacaggatctgggacttactctgctgcccaggctggagtgcaatggcatgataacagcacactgcaacctcaacctcctgagcttaagcgatcctcctaccttagcctccctactagctgggactagtgagtgccatcatgcctggctaatccttttttaagtacagacaaggtcttgctgtgttgttcaagttggtctcgaacccctagcctcaaacaatacccccgcctctgccgcccaacaaacacaagccatggcatccagccaatcccagttttcaagccagttatgcatagcacagagaggatatagtgggggtggggtggagcctgagccacctcatttatttatttaacatttatttatttatttatttagagtctcactctgctgcctaggctgaagtgcagtggtgtgatcacaactcactgtagccttgacctcccaggctcaagtgatcatcctacctcagccagcacatgccaccatgtccagctaattcttttttttttttaatttttttatagggacagggtcttgctttgttggtctcaaactcctgggctcaagcaatcttcttgccttgacctcccaaagtgctggaataacaggcataagccaccatgcccagcgtatattttattttactttatttaattttttaaagacagggtcttgctctgccacccacgctggagtgccatggaatgatcatagctaactgcagccttgaactcctgggtgatcaattgatcctcctgcctcagcttcctgagtagctgggactacaggtgtgagtcaccatgcctggcttgactaatttttaagctttttgtagagaatgggtctcgctttattgcttaggctggtcttgaactcttggcttcaagcaatcttcctgcctctgccttccaaagtcctaggattacaggcataagtcactgtcccaggcctgagcagcctctttgtaagcccagataagcagcctctgcccagactgacctgccctaagtcactatcctgacttctgaagatcatgtgtctccaaccatttccacctaaaccactggctactcccaaatccccagccctttgtcccaggcagcagtgacgggacatcaaccaggagccattcctgcttccccaccctctgtcccctagagcccagtgatctacctgcgcatagttcatggtccccaccccccaccctccagagcccagtgatctacctgggcatagttcatggtctccatggtgctgtcataggcagagcggagagaggcaaagttgatgagcacatctacctccggatgcttcctcatggcatcagccatgttcttgaagacagggatcaggatctctttgtgcccccagtaaaacttctgcttgtggtccccactgtgagaaagtaaaagaagaattaggatatcctcaacctgtcaggactggggaaggggaagctgaggggaggaatttcacctagaagatagaaaaggcatggtctgtgccctcaaagaattttcatctaagggacaaagatcccccaggaatactgactgcctctgtctctaggatgggcaaagccttccccagcaaagggaatgagctcactgactcctcaagccttgccttttttttttcttttgagacaggttcttgctctgtcacccgggctggagtgcagtggcataattagagttcactgcagcctcaacctccaaggctcaggcaatcctcctgcctcaccctcccaagtagctgggactacaggtgcacaccaccatatccggctaatttttaaattatctgtagagatgggggtctccctatgttgcccagggctggtctcaaactcctgggctcaagcagttctcccacctcgacctcccaaagcgctaggattacaggcatgagccactgtgcccagccccaagctttgtcttagcagaggaaggagatatttcccgccatggggtaactcacgtgaaagggtagaccatggcagccactgagggctcgtctcgggagcagacatagtcaaagtccagcatgccttgcacggcccgggtctgcatgccccacacaatggccttggtgtggcggctgaagagggtggtgctctttcctggtgggcaaagacacagagagtgcacccagaacacatacccccaggagacctgcaggggccagggctgcctgacagacccctccacgccccatgtccacagggtgatgcctcatcacaaccgtaaaggaatgtcaagaggacagaattctgagaacttggggaggaggtgcctcgatttttctggaagaaggtggcagaaagagcaaatcaagctaagagggcctgctagctggtaagtagctctgcaaagaatggagaaagaagggccccacagtcaaagatgcccaggataattcctataggacctgcttcatttcccaggcaaggtgtgtcatcagcttatatgcaaatgaggtcttaacaaattatttttaaagtcattggaaaaaaatgcttagctcgcccaattttggtgggttcaggacttatgttccaacaatgcttattaccctgtaaatctggacataaaaccagctccagtcagggtttgaatcagcatgaattctaggtcagtgtaggtccaaagaagaggtttgtgcagccggggctgaggacacagcagccttatcgctaactgtggttctggccagggctctgcacaaggcaggagcagcaagctagttacacagggccagtgccctcaacctgctctcctgtttttcctgtccttctcccttctaccaggtggctctttcctgctcaggacagtgctcttggacagaccctccagtgggcacttaagaggtaaggcgcaggtcaggtgtggtggctcacgcctgtaatcccagcactttgggaggctgagaccagtggatcacttgagctcaagagttcaagaccagcctggccaacgcggtgaaacgctgtctctaataaaaatacaacaattagctgggtgtggtggggtggacacctgtaatcccagctactcaggaggctgaggcagggagaatcgctcgaacccgggaggcagaggttgcagtgagccgagatcgtgccagtgcactccagcccaggtgacagagcgggactccatctcaaaaaaaaaaaaaaaaaaattagcgtggtggcatgcacctgtaatcccagcttcttgggaaaccaacacacaatcacttgaaccaaggaggcagaggttgcggcgagccaagatcgcaccactgcactccagcttgggccacagagtgagaccctgtctcaaaaaaaaaaaaaaaaaaaaaaagggtaagggaacaaaaggagctggtagaagtgcagttctctaggtgggcatagtggtgcgtgcttgagtcctagctacttaggagactgagatgggaggatcacttgagcccaggaattcgaaaccagccaccgcggcatagtgagaccccacctcaaaaaaaaaaacaacaaagaaaaaccttccatgatgcgattattacgcattgcacgcctgtaccaaaatatctcatgcacccctactatgtacccacaaaaattttaaaaagaaaattttaatgcagcaagtatatttaaaaaaaaaaagaaaaaagtgcagtccttagcctaaagggaaaggacttttaccacgcttcaggcagttgactttcccctctgggtccctgcaagtccaagaggaggaaagcagccctcagggaggttctgagctcccctaggaagaatgatgcatctagcccagtggcatctcgtattaattaacctactgtactagagcaggcttggctaaccaagttcatggtctcattaaatccctgtacaggcctgcctcttccatcacagccttacagcttctcatgacagaaggttcctgatgttgcaaatacctgggatttactgtcacctagaccccccgggttctgctgagacatgagatcacagaacaaggggagccacctaatccagttctcccacttcccagtcctaggaaactgaagcccagagatgccaaatgattgaggtccgaggtcatccagcatcagagccaggattacacaatcacttaaaatgcagctcaactgtgaaagtgaggagggagaatataagtgtgagttcatgacccgccatcctcaggggaagcctgcatcatgtcacccccgccaggtgacgcacgtgcacatgcctctgatctatctaccctgccagctacagaaatcaagacaaagcctggaatctaccaacctaccagcatctccagcaggaagggtggaggtaaagtggcccttcctcaagcacagagaaaccaaagctgaagggtgtatcctcagcccaccagcagcagagaggctccagagagaacctctgtgccaggggctatgccccctacaccaggcctcctctggcctcgctgaggggagggctcgctcagccataatctgttctccctgacacaccctccttttatttctctcactccagaaagtaacaaggataacccccctcctcataaccctcctccccttcagagcacagagagctcctggagaaccagggctggtccctgttctttccacactgggctcactctgctcttaactttttccagaggcaaaaacatcaggattaaagccaggtggccacagtgctgcattccaggcctttccagctggttatcgaccctgccaattactccttcccctccccttagcaaggggacaacaaagacttccccgcctccacggctgtgaatgtcaaagttaaatggacgctctgatgccatgaaccaattaatctactcagctaggctggtgggtgaatgcgcatgcacagaagtatccactgtaaaatgtgacctcatacaccagacaaagctcataccccttccaattacccagtcactagatccgctgcacacccttctgcgcttccgtctacctccttcttcacctcttttgttcctccaccacaaccccagaaaaagataaactggtccctggagcttgaggatgaagctggcagtggtgaagccgaggcaggaaaggtgggaaaatgacatcaggagatgtaaatgagaagcaggggtgacttgtggctccccttctgcaccccagcagtgacagacgcccacgactctctgccactccccatttagttggatggctccctccttcccaggcgacactctctccttgacaccactacactctccagggctgtgggtctggctcttgctccttccaaaatctctaccccttcccaagcttggagccagaaacagccacacagtgaggagaggactgagtggggcgcgtactgagcacggataggaggggaggaagagcgaagacttaggacttggggtcaggccacatcaaggcagggacagaaaatagaccagacgacactgcaacccaccaggggagggggaaacagagcacacagtaaaactgtcacccgctaacaaagccacacgcggagtgggggcagggtgggggcatcctaccttgcagggatcttggacttgggactgaatctgtcaaagaaaatgaccaaggcaactgagtgacccactgatggctggaggctttggagggagagggtgggaacagggaagggtcccatggacaagcctttcagggctaaagccctcatcatccctctcctgttctgcaatggacaacggagtaaggccagcagaagaggtgaaagcaccgatgagcagaatggaagcaagaaagagcaaagaccaaacgggcagagagggggcaggaggaggacaaaggctgggcagatgtgctcaacaccagcgcctcccccaggccctctgcagggacagctggatgacttgaactctgggctctctagctggcgcagtcccaccctcttaatgccaatccctttttgtctccatgaaacactatgagatgattggccagcatggggttgacccgtgccatggacaaggatgctgatttgggacagtgtcactattttccaaaatgccatagcaaagtgtgtcccaggaagaggctgcacaggtataccagcccaggggtaactaacaccacttatgtagagctggctgcaagggctggccggcaggaatcacatctacacggagagaaaaattagttgaaatacagatgggctgacaggcgggggcttttcttgctggggattcaaaggagggaatgtctgttagggccccaagatggtgggggtggcctgggaactgctgttgtatgagctggctctgccgtcctggggtcccggtgtctgccctccactcaggagaagagtctcagagaactttccacttcctgggatttctgtaaccctatctcctccacagcctccctgcccagtccacacccccataagaagaaccaggggtagaagagaatagggggagttgaggcgaccaggcacggcgtgggtcctctgcctcaggagcgcccacagggaaggctcaagtcataccatcctcgtgtcccaggtgcactcccattgcaaaacccaaaccgctgttcatctgcctctgccagcccaggggggaaagggaaaggggagagagatacagagggtaccgcaaggccactccctgcaacatgcctgaagcctcagggagttaccttgtggcatggcaggcttggccttctttgcaggcgccacctcatcggccctggactcagaaaaagatgctgtcctgctgggggctggcgtctggggtgagataaggagagagtgtaagaggtaagagtcacacctgggaaaaaagccactggtccttaaaggccccaaagaaaactcgtaataaaaattatgcacagcaatgctctttataagctgcttccaaaagtactaataatcctctaagatacgaattaatattatcccatgttacagatcagcaaactgaggccctgggtggacaaggtactggctaaggttgctctctcagcaaaaagtaagagtaacgatttttaagtttttcttttcttttcttttcttttgagacgaattctcactctgttgctcagagctggagtgcaatggtgccatcacagctcactgcaacctccgcctcccaggttcaagtgattctcatgcctgagcctcccgagtagctgggattacagacatgcaccaccatgtctggctaacttttgtatttttagtagagacacggtttcaccatgttggccaggctggtctcgaactcctgagctcaggtgatccgccagcctcggcctcccaaagtgctgggattacaggcatgagccaccatgcccggccacaatttgaacttggatccaattttaaaatcctttgtccttccattatactactttaatcaggacaggaaaaaaattggcagagatccacaaaccaaccatgcactaactcccgctgtatttcctctatgcccccagggaacagaggaagaagactgtatcctagtggaaaagatgagatggttccttcctgtaaggtttggggaggctggaacctaccgatgtgctcccgctggcgttgaggaggaagtttgcagtgtgggccgctgtgggtggctggttggggatgggccggtggcccagggccatgcccacaatggccgtcatgtgagtctctgtgccaaagacatggatggggatcccagtggtcttccctgcaagggaaggaaaaaaaaatccataattcaagtctgcagataagggcccaagtccatgtgaccctgcaaagggccttttacagccatgatcagtgtttggcgcattcagtgcaagaccaatatccaggacaaatcagctgtcataatttcaccaccagacaaatctttctaaaggccacttgctgataacaagaacaagaaacaggccaggtgcagtggctcacacctgtaatcccagcaatttgggaggccgaggcgggcagatcacttgaggtcaggagtttgagaccagcctggccaacgtggtgaaaccctgtctctactaaaaacacaaaaaattagccaggcgtggtggcgtgtgcctgtaatcccagctactcggaggctcaggcaggaggatcccttgaaactgggaggcagaggttgcaaagtaagctgagattgcgccactgcactccagcctgggtgacagagtgagactcttgtctccaaaaaaaaaaaaccacataagaaacatatttactggcaagattcaagtaaccaaattatcagagcccatattcctcctgttcgcagtctggaccccagctctccagctttccttagccctcatcgcatgcatccaccagtgcttggtctctgttcctaaacaccctgagcccattcccccagggctctggccctgcttctccctctgcgtggagctctccatggagcttcacctggctgctctctggtctcccagctcaacccaagcactacctcctgagaaaggccccctctgaccttgatggtcactctcccatgccacgctcccctcctccttgtacagacagacccctagcatcttctcctactgtttacttgtggaatgttctaattttaagagcatgatctggtaacttcactgtgctgtccccaggcctgccccactgcacatagcagatcctcagctttgaaccagctctattaaaaagaaaacaaaaggctcacacctgtaatcccaacactttgggaggcctaggcaggtggatcgcttgagtccaagagttcgagaccagcctgggcaacatggcaaaagttcgtctacaaaaaaattagccaggtgtgtgctaattttttgtacaaaaattgtgtatttattgtggcatgtatctgtagtcccagctactcaggaggttgaggtgggaggatcccttgagtctgggaggcagaggttgcagtgagctgtgatcacaccaccgcactccagcctgggtgacagagtgagaccctgtctccaaaaaaaaaaaaaaaaaaaaaaaaaaattgcctataatctcagcactttgggaggccgaggcagtctgatcacgaggtcaagagattgagaccatcctggctaacacggtgaaaccccgtctctactaaaaatacaaacaaaaattagacaggtgtggtggcagatgcctggagtcccagctacttgggaggccgaggcaggagaatggcgtggacccgggaggcggagcttgcagtgagccgagatcgcgccactgcactccagcctgggtaacagagcgagactccatctcaaaataaaaaaaaaagaaaaaaaagaaaaaaaattaaccctattcaattcaaacctaagtcaaattgtgtcacttggctggttgtagtggctcacgtctataatcctagcactttgggaggcaaaggcaagaggatcacttgaggccaggagtttgagatcagcttgggcaacacagtgagacactatctcacaacaaattttttttttttaattagccaggtgtggtggtgcacacccgtggtccccaatacttgggaggctgaggagggaggatcacttgagcccacaaggtggaggccgcaatgagctatgatggtaccactgcactcaagtctgggtgacaaagcaaggcactgtctcaaaaaataataataataataaatatgtggttcctctgcttgaacacttcttgtgcctgctgtctcacagtgatggccaagtcctcctgtgacctgtagtgtctcgctgccactctctcagtcccagccccttaccactgcagggtatgggaatttgcccttccctctccaagagtcaccatggcgctgctccctcattctaggtctttgctcaaatgtcagttttcttttctttcttcttttttttttgatacagggtctcactctgtcacccaggctggagtgcagtggcatgatcacggctcactgcagcctcaacctcccaggttcaggtgatcctcccacctcagcctcccaagtagctgggactacaggtgtgtaccaccatgaccggctaatttttgtatttttttttttgtagaggcagggtctcgccatgttgcccaggctggtcttgaactcctgagctcaagggatcctcccacttcgacctcccaaagtacatgagccacctgtgcccagccttgatcaagtttgatcaagcattttctgatctccctgttgaaggctgccccgacccctcccacatgcattctccctttccctgctttgttttccttcctggcactcggcaccccctgacatagcagtttgtgtcctccgttccatcaaggcttgctgtctgtccatttgtggctgtaaccctcgtcaccagcacaaagcccagcacagagcgagtgatctttaataaatatctgttaagtgtagagctcaatgaaaatgctttcctgaccactccaaagtttaggatagcactctgtgttgggacagggaatggaaacccaaactgcacacccaggaaggggagtagagagcaaaagagcctaagactgatgctcaggaatcagaaatcccaaagaggaaggccacccacactcagggtgagggggagagaaaaggtcctcatcttaccgacttctcccatcacccgtaagccctcctgatagttggggccacctcttcggacaaagattgtgacttcgtgctccttcagggggccctggtaatctcgaattgctctcacgatgccctggaagcccaaagtgacatgtgactaaaaacaaggcagccacaagtcaatgatttataaccgtgataaacaaacataccaggtatatgtgacaagtgctgctcctcaggaagcacaggactacgcataagcagccacggcctgggatatgatcactcagaatgttgctgaggtgggaacgtggggtacccgggattgacatcccttaatgtcatggtgctccaggcctccatcatcagcaaggccttgctggtctctcttttgtcccttctgcagtcattactgcctcttactacatttttgtttttggtggggatatctatgttgggctctatgcaagggttctcagaggtactaagacatagtcaatgtcctacaaaagcttcttaagtgatgtgcgggaatagttctttcttttgagacaaattctcgctctgtcacccgggctggggtgtagtggtgtgagctcggctcactgcaacctctgcctcctgggttcaagcgattctcctgtctcatcctcccgagtagctgggactacagatgtctgccaccacacctggctaatttttttatttttagtagatatgaggcttcaccatattggttaggctaatctcaaactcctgacctcaggtgatccacccacctcagcctcgcaaagtgctgggattacaagcgtgagccaccgcgcccagcgcggtgtaagaacagttcttacaatggatatccactttggaaaaatgagagggtggaaaggtgtgtcctagttctgtttctcaagacagaggctagatttttgagcctagagtctgacttctgtcacccaaggcattttacacaaagttccatgtacagtacctgctccaaaccaagtgccctaaccaagggtcagtacagggcagctcagaagttaaataaaagctgctgaggctcccctgtcccagatttgtctgttaaatcaggtccagttatggacaccctgttttgggcaggactgatggggtctggccccacattttatttatgttttgagacagggtctcattgtcgcccaggctgaagcacagtggcacgatcacggctcactgcagcctcaacctccggggctcaagcaatcctcctagctcaacccactaattttttttaaattttagtagagatgagatctcattatgttgcccagccttgtcttgaacttctgagctcaagtgatctgcctgcctcagcctctcaaagtgctagaattatagttataagccaccacgcccagcctctcacttcttgagacctcagactttcaagtttgacacttatctagtcattattctcaaaactcacatggatccaccaccagatgtggcacacactcttttgaatacactcactgagcatctgacagcatggaatattaataaatggcctccttgggtggctatcttgaaagggatgactcttgagacacgttagctctgtcttccttgttgacagcagtcacatgtgctttaaagcatgtgcacacacagccctgactcgtgaacaggcacccaggttgagaagaccccagtaggatgagaggagccccggatcatcaaagcactttcttcattccaatcttttggaaaaagggctcatgacagaaagatataagaccaggatggccgggcacagtggctcaagtcagtaatcccagctctttgggaggccgaggcgggcagatcatgaggtcaggaggtcgagaccatcctggctaacatggtgaaaccccgtctctactaaaaatacaaaaaaaattagccgggtgtggtggcgggcacctgtagtcccagctacttggaggactgaggcaggagaatggcatgaatccgggaggcggaggttgcagtgagccgagattgcgccactgcacgccagcctgggcaacagagcgagactctgtctcaaaaaaaaaaaaaaaaaaaaaaaaaaaaaaagagatgcagagaacccagagtctcacgagagtgttgaaagtaaggaggatcggttgggcatggtggttcacacctgtaataccagcactttggtaggctaaggcgggtggatcacctgaggtcagttcgagactagcctagccaacatggtgaaacccctgctccactacaaatacaaaaattagccgggcacggtggtgggtgtctgtaatcccaggtactcaggaggctgaggcaggagaatcacttgaacccaggaggcagaggctgtagtgagctgagatcgtgccattgcactccagcctcaacaacaagagtgaaactccatggaaggaagaaaggaagggagggaaggaggaaaggagggaggaagagaggggagggagggaggaaaggaaggaagggaggggagggagggaggaaaggaagggagggaggaaaggaaggaagggaggggaggaaggaagggaggggagggaggaagggaggggagggaggaaggaaagggagggaggaaagaaagggaagaaggaaagggaaggaagggaagaaggaagggaagggaagaaggaagggaagggaagggaagggaagggaagggaaaggaagagaagggaaggaaagaaagaaaggatcgattgagccagtgctccaaagcattggtcctgagaaggaagaaagcagaaattcgcctcccatgcttcaggtgggagagttatagttcagcgtagcagctgcttgcccagagacacacagcgcagatgggcagctcctgtcccagtgtcttctccacccctttaagagaccctggggcaagagctccctacctgacctgggaactcatggtaacttggctctggctcaaactctgctttcaaggccccttccctgctttccccaaaccactttccccagaaactgcaccactgttgcaactgttaccttgaacgtggcagccacgttggtgaagtttgcgatgctgcctccaatgatgaggatcttgcctggatttggagtaagagagaatcaaaaacagttacataggtagacttgagcatcttcccagcaatccaactgaggaagttcttgttcccctgaatgagggtcccccatctgccaggaggtactggggagtgagtaggacagtctctccagacattccactttatcagctcaactctccattacctatgccaccagacaggggtcagaacaaacccacaggagcactacataactcctaaccaacatccaaaaatccaggttggtttctagatatctctggagggaatctctctccctctctggctcaaggaaagaagaactggtatgcagagctccaaaacacaggtggtaaaggggcactgagactcacagaggccaggtaatataagagggtcactgagtttattgcaatcagagtttatcgcaatcggataaactgagtttactgcaattgtagcaggagcatgccacagccacctcctcccctgcacttgtttgaagggctttatcacacatcacctcttgccctctcagtcccctcccactgatagatgtggtccctgccctctgtgcagtcagagaaactgagagccaaagttcaatgattagcctcaagttgcaaaggaccacacacagccttggtgactcctcagacgaagctgtcccattgcagcctgctgggctgtcctggggaagtggggacaggtatgtgtgtgtgcaagtatctcaccatctgggtgcttctctcgggtcatgagggagaggatagtcttggcatagtcataggtctgctgctcgctgggggcgcctgagtactccccatagtttgccagctcgttgacaccccctagatcacagatggtatcgctgccaaggagacagaagtcagtgatggctctcacacttggggcagggagtggcagcctggtgcctgggaggacacacggatccctcaaaacactggagttagcctgtggaaccggcctcttggatctccagcccccaattcccatgcaagtctggcctgcaggttaatggtgctacatcagactcttctgggcagtgcactctgccagccctaaggcactggggagccctggacagacaatggcaggtaaaatgaacaatgagcacctccctaacacaaagacaagcaaaatcacacactgcaggagtccctgacgggctacccaagagaaagtgtgctgcagccagaggaaatagtgccagtcacacacagaagggaatggcagattgcacatctagaagtgagcaggtgtctaccatgcttaaagtgaaaaaaactgctaattattgtaaagggtgtagaatatgatcctaatattctataaagcaaagagtataaatatttatatatgcttgacaggacatacagtaacttgctaactggggtgacctggtcagggagaggatggggaaatgtccaggcaactttcactttctagctcattttctgtacctttgtatggagcacgtaattttcagaattaaaactcataaaacagcttcattttgacacaaacaagaaggttatagaagacactgggtgcaggacaggccctcaccaacatccctcgaagccctctgggatgccactgctttcctctgccccaaattcccacaccaaagtgacaggaccccacccacccaggctacacacatgttgatgctgggtagactgggctggcatcccttcagcaacccccttcggtcacctgtacacgacagaggcgccacccccggccaccatggtccagatcctccctttggggttcagcaaggtcagcttcaggcttgccccacttttggcatcgaggtctgcaatgtaggcttcctggggaccagacagcaacaggtaggcccttggggtaccccctttaccaggtcccagatcctaggacccctccccgctttccctggaagcacatgaaaaggtgccttaatggggtgggaagaaggggctacgcagggccccacatgccttgaagacacttgatggtgtctccaagtaccaaaaacacccatagtcacagtcactgcctagggacaaacttcccatctcccttctctgacgtcaagtacttggccctctgcctaagtcctgagcctaaccatgtccctctgctcaaccatgccctcaccccagcatctgcctgctcggcccatcacacgtccccccaaccccaggcctccccagacgagaccgtctcctagcccagcctcttccctgggcctggggtacttcccagaaagcccagtcctgctgtgaggacttctcagaggacagagtgggaaagagcaattaaaattctcagtgagacgcggagagaatgaccttccatcaggattaaggcgagacacttggaatcatggagaggcaacaaatcaagtgaagagtcgagggaggctgattgagagagaaatctaaaaggatttctggctgggattcagaggcttggctcactcccacccccaccccattgaggttttaagaaaattaaatgcttctcagtcttcctttccctgccaaataaacagctcatgaaggggggccaaatgcacatcaaagatgagtcacctccccaccgccctccccccagtccccatctcctctctaaaccagccttacctctggatatgcctcccgcccgaaggggggagggaactcgatgtcaccccacttcactttgcagatgtagtcggcagtggcgtccaccttggccgccaagtcaaggacatagactccatctttggtcactacttcaaggggagcagaggcaatcatcagacaccggctctgggtagagacaaccaccaacctccaacccctccacaaacaccgatcccatggtggcccattcaggcctcagaactctctaagctcagtaagaaaccagagaggcccttatggagacagagcttttccccattaaaggcaaaacaaattctacaaggccattcccctctccctgacctataggcaatgggacatggaggtctgtattagttgccatggcaattttcaaacatctttacaaaacgctacactccctgcttttgagtatctaaccatgcgcaaacccatggtccggccacttttaaaaagtgtttaaaggtacatgttgctgacagaagaccccccaccggtatgcacatctatgtctcccagggtctggctaggggaagcctcagtgtcaggtggagcaggggccgcagggtgcactggactcccaatcagcaggattcgtttataccacctcactggacacccatcttcctcctcccccagggccatttagctgattgagttagcacaaggccatctggtccattagaggggctgcatcctcagctggaatgatttgatttctcgccttcctagactctgccctgagaagtcctggccagagccagcccacgccactctccctcaacaccacctgcttccttcacagcccaagagactgagaccaagctcttcccagcatcaagggttaatgattgaccaactcccacagagggaggcaagtgtgaggcctctgagtgtaccaggaggaatgaagggccaaagggtgagagcagtgcagaggctgcccacctcctgctgtcagaaagcctgacctggcgggaggagcagaagcacacagtcagatcaaaaccaggacttctggccgggcgtggtggctcacgcctgtaatctcagcactttgagaggccgaggtggacagattacctgaggtcaggagttcgagaccagccttggccaacatggtgaaaccccgtctctactaaaaataaaaaattagcctggcgtggtggcgggcacctgtaatcccagctactcggaaggctgaggcagaaaaattgcttgagaccaggaggcggagattgcagtgagctgagattgtgccactgtactccagcctgggcgacagggcaagactctgtctctaagaccaaagagagaggttggagttgactaagagaagaactacagtcttctgagagctcagaaacaggaactggcactaaacctgcatggggacccctctgcttgtgcacatctgtcttgtgttaccctctggcaagtgggagtctggttctctgaatgccaaggccagggctgtcataggcactgggacccttgccccctcccagccaagcacacccagttaccaaggggattgatctcgaggtaggtgaagtacaagtcctcgtagaaattgaagaggccggagataaaactggccagaattctagaggtgggagggagagagggacagttcatccatcagggagcagctcggcagcaccccaggcgccccgcagcaatctctcactgccaccgacagctccatttccctaaacgcaccccactggcccttccatctcctctgcaacccctgctccctggacatagctcttcagccactgaggcggaaaggagctgtcaggcgagaagctggaggcagaggtgtcagacagacaggggcaaggaggtgagggatgctggcggcatatttcagtctggttccaagccagtccccgccctgcacccagctgtcttcctcaggacagggccgtgtctaccacctggctcccagagaggagaccgctctgctctccccagtctgtgcccagagcctgtcggtcttctcatccgaactgccacctccctaccgtccctctcactcaactctttcttgtcttcaggggcgtggaccaacaggtgttttttgatgtcctcaggattcagtttctcatccacgccaacaagcagcttctgggccttggcgtccacatcacccacgtccacacccccctcgtggtggaacaggacgtagtccccttctcgggtggcatagatgcagacatagaactcctcagccttgcaggtgaagagacaggacagtgggattggggttgtgggggcgaagctggtgaggggcgctgaactggggaagatggtctaccatgtactgggagaggaaaccaatccccacggtctcattttctaaaacccagtgaaaaccattcatccagagacttgtccaccatcttttccccgaggacaagaggaagaagcctctaccccactggctggtggtccagactgaatcagtatgaccaaccccagctgaggggtggggcctgcctgcaggtcgttctcatccctgcacttggaagtcccctttgttaccagtcctaactcctctctgctgtagaccaagccctttccttcccctctggactcccgagtccgcagcaccctcagatcctcagtgcagcttcagggaccctggtccctctgactgtcctcatcagcttgacttctttcctcaggttacggtggacaaacccaaggttccaggagggagaagacccagcctggagccgcctcacacatacctgactgtgggggacgaagggctcgatcagaaagttcttgaggaagcctgtggccttgccaacctacagaaaaattgagggagatgaaactcagagggacagcacgtcttgcccctagggcagaaggagggactgcacaggggtggtgcccaagcactcccaccaccacacccagcaaagagagatttttccagaaaaaatggggtcacagatccctaagctcagtaagtcctcaggagatgccctttcaccccttgctctggtgcgggctgtgcctgaacaggcaccgaccttgcccactcttggcctcctctggagggtgacacaggacctgcgcaagtgaaagggctccaacaagtcacggctgtggcagagcttgacggggaggggaaaccgggtagaagggaggtaaccattctgcttcatgagccttgaggaaggcacagtgactcagcctcaggacatgggtccgggcgcagggaatgggtggagaagtggggagccagggcttaatcagggaaacttctccacgcagactctcctggctgaggaccacaggcctgcagagctaatcagttcgagtgattccctggcggcggctgtggcgagacagccctcatcctagtaagtcccaaaacccccgcctggcctgtgcgtcactgctgagtcagggaccagacagcaatccataagaggtaatgagccactcctgctggcccaacgctgctgccagctcagatgtctgatgtcccaccttcccctcccagaggccagcagaaggaagcaggatgtgctccctggggacatgctcagcatccctccctccaatcccaccatcctctctccaaaggcctgggaactcaagggacaggtcgcttcacgcctgggtccatgtgcaacttcaaggatcccgctttacccatgagggccagaaactgggaaattaacatttaagggctactctgaggaagcccaatgagggaggaagacatctccatcaccaccttcattgctattctcgaggcagccaaggaagagaacagctcatccctggtacagtttcaccccagatgagcaccaggcccttcagagccacgtgctctacagagccaggtgtggatggcacattcttcccaggctaggccaggcctcagctccactccctcccttagtcctccagctcccctggggaataagaagaaacataattttattccaggcatctcttacccttcctaaaccatgtttcactttaactctctcatctacgtggttgaaattcatcaccaagctgggagaagttaataattgaatttgggcttggtggcacacatctgtggttccagctacatgggaggctgaggcaggaggattccctgaggccagaagttcgagaccagcctgggtaacattcaagaccctaactctataaaaaaatgttaaaaagcagcctggatggtggcatgcacctatagtcccggatactcaggaagctgaggtgggaggataacttgaacctgggaagtggaggctgtagtgagatgtgaacatgccactgcactacagccttgagtgacagtgtgagaccctgtcttaaaaaaaaataaagtaggccgggcgcagtggctcatgcctataatcccagcactttgggaagccgaggcaggcagattacctgaggtcaggagttcgagaccagcctggccaacatggagaaacctcgtctctactaaaaatacaaaattagccaagtatggtgctgcatgcctgtaatctcagctactcagaaggctggggctagaaaatcgcttgaacccaggaggcggaggttgcagtgagccaagatcacgccactgcactccagcctgggctacagagcaagaccctgtcaaaaaaaaaaaaaaaaagaatcagaccatttccacctggctcttgaattatattgaggttacctctgcagcacatcttgcccaaaccaataaaacaaagaagtttggatgatgagggagctgggaatgggcatcaagactgagcctactgctggcagccacctgagtgggtcagcgccacaggactcctgccttccctgagctacaatgagactggctgtgggggtgatccacagagctgctgacctggaggtgaccatatttgcttctgttaccacacacgttcatcctgaccccatgcccactcactgtggcttcctgtcccagccgtggcttcagccaggacttgaccccatccagagtgaggttgaccccaacgagaccaagttttccacgacgtttgatcagctggtctggcttgactaccaagttctggaacaaaagcggtttgtatttagagtgaggaagaattagataaaccgtagtattttggggatccaaatagaggacagcagggattgacttcccattcactctgctccaaagccagccctaaccatccttcagagtcaactcctggatgcttcctccacctaccctagccaatatcttgcttttgacaaccaggtatctagaggcatttgtgcccagatggagcctggcacagagtaggcgctcagcaaatacctgctgagtgaataagtgattctctaccctccctatgtgatacattagcttcttcattcaacagtaagcccctcagaatatggaccagaacatgtgttccaaagaggaaaacagagagacagagccttgaggcagcaaggaaccttagaggtcatctggtcaaccccatccctgtgcttgaaccctgtctacaacaggcccaataagcagcccctaaccactgctcatacatctccagggccaggaaactccctccatccctttgtggttgagctgcctcctagtgggaagaaacaccaccactagtcctaggcttactctctgagccctgccaaggaaatctaagagctttctaacaatggccctgcaaagatctcaagaacagagccctctattccaggctgaccctccagggtcggggccattcttcacaaagtacaacatcacacttcctaattgccttgatacattcctgatatactccacttaggggaggagagggcacatccctactttttactgagcatctaccatgtgccaggcaccaagcacgctaaatgcttcttgctaatctttacagctcaaagtgagtattatcccattggagagatggggaatctaaaactcaaaagaggtgaaatggcttgccccaggccacatggttaataaacacagctttgatttggacaccagtttgtccagtttcaagcccatggcagggtataccatgctggggtacctcaacatgcagggctcagcatgaacacaaaccctgctcagcccatggcatgcttcccacagctgctgctggcagcctccaaccccatgaccctatcggcatcaccaacaaaccaatggctttctcttcctcagaccccgggcctggaagaaaggcccaaagtggaggcagggctcacctggctgagcagccaggggtggtcctgcagcaagcgggcccagtctgtgtcaggagtgacccgagcatacttgaaccgattctggatggctgaggtggtacagatgaacttgtaaaggagttctttgcccgtctgctctgaaattgccttggccgacatggctgcagagagacctgctctacctgtctgggagagagaagctggtcagaagggggcaggcgtgtggaggcactatcttccccagcagggcagacccactcccagttgcccccagacaataaaaccagatctcagcttttctcaagaggaaggaaaaaatgctgtcccagcgggagggatggaagagagatatcaagcagcacttttgccagcagaggaagaagatccagagataatgggtgagggaagatagagaaaaacaaaagtgccatttcccctgggactcttgccttaccctgccccattccctctaggcaaactagctgatccacaaccacactcatcctggagcaaaaggcagctggctagaaggccaagaaaaccggtgctttgacccaaatctgagtgctggtcccatctgaggtgggcagacactgaaacacctttctgttctctgaccagtgcagagtacggctgaaattgcaaaaggctagcctttctctccctacaggtttcatctcccccacacccagatttacccctatacacacccttacacaccaccgggccaatggccaagccagcaagtttacttagcctcaaaaagggtcacacccccaggtcctggttagaaggggagtaggggaggggggaggatcatcgctaagctcttttctcctcttttctcctggacactagcctcccaatcctgagtatggagcagacacagggcagggaaaccgacctttagcacattccacccgccccactgcgtcatccagctgctaatttagagcaaaactcactaagaagaacagatgcctctctggggaccaccctgtagtggtcacttctaactggggcggactgagaggaggaggaggaagaggcagaaaccatcctccatcacatgtataggaaaactcatcttggagttcgaggctacagtgagctatgattgcaccgctgcactgtagcctgggtgtcagagcaagaccttgtgtctaaaaaaagataaaaagaaactcatctcatatgagctctgggaggtacactgagatttataaccccatttcttagatgaggaataaaatctcagaggcgttaggataacttgcccaagaagcccacctaataataagcaaggttatgacccaagactcgaacccaaaccctcttacacctaggtccccagaaaaatccacaccagcccaagaaaagaccatttttccaagagccaggcccatgtgtccttttcacttcaaagagtctatgataagaatttcatcatctcccctctccaagactctgtcctgatacacccattctcctgtgggtaactcaaggactgagctggggaggggaatcgggggaggtgggcatggaaattcaggccaagagcttggccggatcaggaaaagtcactcctgactcccccaaagcccagaagcaaagctgtttaatttgctgggggagaaaaaagtcaagtacaaataaaggagggcagagtgaaggagccggcttgtttacacgtgctggaagttgggtctccgttcccaactcagagaaggccaacattccaggggctacattgcgccccctcccaatcggccaggctggtggggcttcaggttctcatcctggcttggctgcctctgtcggcctcctagctagtatccagcatggcacaatgggtgtattcagcctggtgtctgcctaaagtggggtagctgggaaggggctcagagatgttcccttttctggccttcccctggaatgacttgagattccttctcagtatgagtttccagagacgtcccaaccacctcactgccccacggtcctccaccccccacccactgctccatttcccaatatttttgactcagaccagaaaaactggtcctcagattgaatgggtacagcccccacccccttccaaagagagtgcagcccagggcagatcaaggaacactcagagaggagggggcagtggctgaccatcctcagcaattcagactccttccataactccaggggaaaggaagtccctgggctatgcctctctagaagaaagaagtctgagactcccagtaaaacagtcccctgaacctggcacctccaaaacagacacaagacccaactttggaaaggacaagggagaaaaaatggacccctgcagctgagaaatcacagttttcttgagacccagatcaaatttcaggtccaagagcccatctccatagggtctttggaagggggataggagagaagacacaatgggataatacaggatagaaaacaagagatttgccactagagcattctggcttagagacgggaggttgagacaaggaatgtatacaacataataaaaataaggcctctgcaaattcaccaataaagagaaggcaaatggctcacaaacccagggagtggactcagtagagataaatcgcaactttagtggttcagtgaggtcttctgtttttttgttttgttttgtttttttttttttgagaaggactctggctctgtcgcccaggctggcgtgcagtggagtgatctcggctcactgcaacctcagcctcccaggttcaagtgattctcctgccgcagcctcctgagtagctgggattacagatgcacgccaccacgcccatctaattttttttgtatttttagtagaggcggggtttcaccatgttggtcaggctggtctcgaactcctgacctcgtgatccacccacctcagcctcccaaagtgctgggatttacaggcatgagccaccacgcccggccttcagtgaggtcttaaagtctctctaaggcagtggctcttaacctctttgaggcctcagactcttctgagactgaaaaaaaccccagaaaaaggtacacaaatccaattgtgcatattgtttcaaggtgctcacctgtgacaatgatccgatggcccacagactgaccaccagttaagaacatttgcggccaggcacggtggcttgcgcctgtaatcccagcacttcgggaggccaaggagggcaaatcacgaggtcaggagtttgagaccagcctggccaatatggtgaaaccctgtttctactaaaaatacaaaaattagccgggcgtggtggtgcacacctgtagctactggggaggctgaggcaggagaatcgctagaacccaggaggcggaggttgcagtgaaccgagatccaccactgcactccagcctgccgacagagcaagactctgtctcaaaaaaaaaaaaaaaaaaaaaagaatatttgctctagtggaatcagcaaatacctacaaatacctatctgggtttgggaccgctccccagaacgtcttagtctgcctccccagtagctgaatgtgctgtcaaacaagtaacagatgattgggctgagcttggactccaggaactgttacttggtaacagctaaatgtgtaaaccatttgggggaaatcatgccaaggaacctgaaaacacacacatacacacattctctaagggaggggccttatgagctgaatggagtctttctgcagacgggtgagtgacccaggattgagttcacttttagcagacactgagagaagcagcccacacaggaggctgaatgaaagaagcctgttccccagaacacgcccctgggacacagccaggggaagggaatcactggggatgctactaagggtgcctctgggaaagacaaaaacactcatttgaaggttagtatctgcaggattgggacttacgtatgtaggtatttatttatttattttttgagaagacaggcaatccctggagtaaattctagagaggcagaattctgtgagtgccccttactgcggcaggcatagtgtcagaacggggatggagccataagctgtccagtgtctgaggggtcttcccactaccgccccccaagctgtttaggaaggtttctaagaggtgaaaatcacccatctgggcaaatgagacctaccagctgtccctcaccccacattttagttcagctgagccagctgaaaacacagaggaaagttaagggtggagaggagtaggctagctggccaaactgtgctgtgcacttttccttatcgtctcttccaaaatcctcttcccaggaagacctccagggaccccataacggcagaactcggcactgcacggtatctgccaaggttggagaccgcggcaggcgctgggactggcccattgccaggctcgacaggagggcggcggcagcatcctccagccccttgaggacctttccccggccagacttggcgtcagctcaagggtggggtggcaccccggccatctgtcacttaggggctggactcgacgatacctccagtgcgaggagggtccttgctgcgagattccagtcctcgcggcgagacgaggcgaggcctcgggcaccctggggcagcctggccccgcgtggcccgccccggaggcgcgcatagctcattctctccacttgggcgtggagctcaattttgtacccacggaaccaagaagggcctgagcccggccagtgaggaatcggagtgggaccagtcgccaccgctttctctacttcccgtcccggcatccgatgggggaacccggatggagccaaaaggcgtcccgatgagcccgaggagcctcgatagctgtgcccgggaggggtgaggcgcgccaggagggggaccatgcaatgtggcagaggcagaagaggcaaggatggcggcaagccccatgcaaactcccaggaactggaatatgtgtgtgtcgcgcggggggaggggaggggcgtcgacacgcggccaccggccgggaccccgggcgaaggctaacctaaagctaagaccctcaaaacttccgagcagggcgcgtgggcaccgagcccgcgtcggggaaggcggttccgggttgggggacggaggcaggaagctcctagggcgagcgggctccagccagcgaaaacagcctcccgtgctcacctctgccgaagtccgtgcgcggcgcttcttccacaggcccgacgaaccccgcaaaatccggagcaccccagcagccggtagcttcccgggatccggcttttgtcccggcccagccggacttttccccgcccccatcggctcgcggcgagaacggccccgcgattggccacacgcgttccctagcctgagcgccagggctcctcccaattcgctgctggcttggctccgccccacgagggcgggccccggggcctgctgggacttgtagtcccgctggcccatccaccgcctcttgggagcctgcggggccggggcggggccccgggtggggagatgggccgggctaggctgggaggagaacgcgcggtgctgggggttgtggcctgatcgcttgaggggctggacagattgccactcggggagttgggggaggggcgggtaggattagcccaactggctgtaacgcagctttgggacctggagtacccttgctccttcccttgggagaaacggacgtctgcatctcggccgcaccgaatccgattgcttagacagtctccttaagcagcagtgtctggcaggccgctttcctttagcacgtggagcctctctcctccctggactctccccactgggccgatgaggcaaggctgagccgaggctaacagagcatacttcccagtgtgggataaggcaggggccgcggtaagcaagtggggctaggagggtgcaggcacagcgctgtccgtcccactcacctgctcgcctcagcacggatcagggcggagctaggaattcaatgcgagattccagcgaagggctggagccatcccagacagtctcttgttcccaccaaccacaggcttagacactggaatgaatgaactgctgtctcccccttctccattacctgagacagatcgaattttccaaaccaaaaactgggacatccaatctgacaggtgctggtgaacttgtggggcagaatatgtgaaatcagtcctggaaatcaggacatgtatttaccactctgacatgctgcagcctccctccctacctgcaccccaaccctgtaggtccggagctgctccctaagcctaacagctgtctagctccaggaaggaggccaaaagcgtccactgaccgactcaggtgaagaggtcagcccagaatgcagggaagcagcaggcctgtccccctgccaagcactttgggtcatactcacactgcaacagtgttgcgacatttgcagacaaaatcttctccaagaccccctcccccaatcctgttgctgccaggagtaaggtaactgaacttgctacccatgcctgaatcaagtgttccctgatgatgtcactttctggtcccttccctcccattcatctttttgaaatagcagttccttatcacctctcttctcttgtcctaaaatgggggtggccagtcttggtggctcacacctgtaatcccagcactttggaaggccaaggtgggggatcacttgaggtcaggagttcaagaccaacaaggcaaaaccccatctctacaaaaaatacaaaaattagccaggcatggtggcacacgcctataaatcccagctactcttgaggttgaggcatgagaatcgcttaaacccgggaggtggaggttgcagtgaggtgagattgcaccactgcactccaacctgggtgacagagaaggattctatctcaaaaaaaaaaaaaaaaaaaaaaagatacactccaggcaaggcatgctgtctcatgcctgtaatcccagaattttggaaggccaagtcaggcagattgctagagcccagaagttcaagtacagcctgggtaacatggtaagagcccccaccaccaccatcaaatctctacaaaaaataaaaagaccgggcgtggtgattcacatgcctgtaatcccagcaatttgggaggcctaggtgggtagatcacctgagttcgaggtcaagcgttccagaccagcctggccaacaggtgaaaccctgtttctactaaaaatacaaaaaattagctgggcgtggtggcaggtgcctgtaatcccagctactcaggaggctgagtcaggagaatcgcttgaacccaggaggcggaggcaggagaatcgcttgaacccaggaggcggaggcaggagaatcgcttgaacccaggaggcggaggttgcagtgagccgagatcgcaccagtgcactctagcgggggcaacaagaccaaaactccatctcaaagcaaaaaaaaaaaaaaaatttagctgggcactgtatcgggtgcctgtaatctcagctacctgggaggctgaggcaggagaattgcttgaacccaggaggcagaggttgcagtgagcagagatcgtgccattgcactccagcctgggccacagagtgagactccgtctcaaaacaaaacaaaacaaaacaaaaaaataaacaaaaattagcagggcatggtggtgcacacctgtagtcccagctacttgggagaccgaggtggaaggatcacttgagtccaggagatcaaggctgcagtgagctgagattgtgcactccagcctgggcgacagggtgtgaccctgtctcagaaaaaaaaaaaaaaaacaaaaaagaaaaaaaggaaaagaaaagaaagaaggaaggaaggaaatactcctgggaggccaggtgcataggctcaggcctgtaatcccatcactttgagaggccaaggagggcttgagcccaggagttccaacccagccttggcaatacagtgagtctatgtcactacaaaaaataaaaaattagctgggcagctgggcatgctggctcacgcctataatccgagcactttggtaggccaaggtgggaaaatcacttgcgtccaggagttcaaaaccagcctgggcaacatagtgagtcactgtctcaaaaaaaaaaaattagctaggcatggtggcacacacctgtagtccaagctactcaggaggcagaggtgggagaatcacttgagcccaggaggtcaaagacgcagtgagctgggtgggcacggtggctcgagcctgtaatcccagcactttgggaggctgaggcaggcagatcacttgaggccaggagttcgagaccagcctggccaacatggcaaaacccatctctactaaaaatacaaaaaattagctggatgtggtggcacatgcctgtaatcccagttactcgggaggctggctgggtgcagtggctcacgcctataatcccaacacttggggaggccgaggcgggcggatcacaaggtcaggagattgagactatcctggctaacaaagtgaaacccaagctctactaaaaatacaaaaaaaatagccgggcatggtggcacgtgcctgtagtcccagctactcaggaggctgaggcaggagaatcgtttgaacccaggaggcggaggttgcagtgagccgagatcacgccactgcactccaggctgggtgacagagcgagacaaaaaaaaaaaaaaaaaaaaaagatgcagtcagccgtgactgcaccactgaacatcagcctgggtgacagagtgagaccctgtatgagaaaaaaaaaaagaaagacaaatacactcctggggaaatggtcatccaggcgggacataaaatataataaactctttgaaggtcaatttggtaatatcagtaaacattttaaattcacttgccctttggtccagtaattccacttctaataatttatccttcagatatacttgcgtatgtgcatgacgaagatagggatctttgtctattttcttcattgctgtatttctagcagtttaaatagggactggttacacagtaagtactcaataaatgtttgctgaatgattgtcctccatttaggtgttgctaggcctaagtttgactattcctgggcaggaacaacaaaaaataactgtccagagagtgagggggaagaggtgctggccagagggcccatgagccagccactgaggttttccagttcactcagtggtctcataccaagtttctgcccccaacgcccagcctcctcaagtaagactctctcattaccccaccatgcacccacagaggttcatctgccttgaattaatcaatctagaacccatcttctcatcattctattttctaacttaaaagctctaaaccaggctgggtgcagtggctcacgcctgtaatcccaacactttgggaggccaaggcgggtggactgcctgagctcaggagttcaaaaccagtctggctaacatggcaaaacccccatctctacaaaaaataaaaaataaaataaaagctctaaactcttttgattttcccatttgaatcacctccctcctcttctagactggactagaggacaggtccctatcagaatacagagggttataggcaccatctccaagcccaggtttgggcattccacctgggttccagaagcctaaaactggctaaggacttcctcctagatttggaccaattttagttaatatttattgagcacctactatgtgaaaggcatactactcacagcagccacttgagctaactaagtgttttcatcattttgcctatgatcaactaacctaatgatcttcagactccaagtccttgggcctgtaccctgcaacctgctgcaggtgagtaagagggaaagatcctatccagtggatctcctttatctgactgtaagcaacccaaggcctaggagagtgccttgttcattttggcatctccagtgcctagcatgggactggacacatattaagcattcactgtaaacatgactaaaaaaaggctcttataatatgtgaatgaaagaaagcaattgtaggggaagggcagggagaggagggaggagatgcagcctggagaagggtctacctaagtgtccagttctactatttttttgtttgtttgtttgtttgttttgagagggagtctcaccctgtcacccaggctggagtgcaatggtgtgatctgggctcacttcaacctccacctcccaggttcaaacgattctcctgcctcagcctcctgagtagctgggattacaggtgcccgccaccatgcccagctaatttttctattttgagtagaaatgaggtttcgccatgttggccaggctggtctttaactccagacctcatgatccgcctgcctcggcatcccaatgtgctgggattacaggtgtgagccaccacgcccggcccagttctactatttttttctttttatttatttattttttatttatttattttttgagactgagtctcgctctgtcacccaagctagagtgcagtggcgtgatctcggctcactgcaacctccgcctcctgggttcaagtgattctcctgtctcgccctcccaagtagctgagactacaggcacgtgccaccacacccggctgatttttttttttatttttagtagagatggggtttcaccatgttagccaggatggtctcaatctcctgacctcgtgatccgcccgcctcagcctcccaaagtgctaggattacatgcgtgagccaccgtgcccggctactatttttttcaaatgcattttctgtttatgtagagtatccagttctaaacccacctctctccttgtaacagcccaagacaggagcttccagcaaagccccatcatcatccaccctgtgaagagccaaggattctaacttccgcaccactcacttttgcccagtactgacaaaccttccatcagagctaagggcctgtgtgtcctggggaaggctctccagggagatgcagccagggcccctctctctaacccgacagaggctgcctgccaccagggaagctggagggatggctagttccactcctgggcagcagttatctctctggggatgcagcatctgtgctcagggaataaagtttctccatgcagcccaaccaggtccaggctggccccttcccagagtcacccccactccattctgactctctctcaaaaactgccactgcctcctccccaccaggtatgttcctataaaattccctcctctttcaggaagaacctgtgcagcccctcccacacacataaatcacttacccttgacttttacatatgacacgtttaaacttatctctgaatgagtttattattattattattattattttgagatggagtttcactcttttgcccaggctggagtgaagtggcgcgatctccgctcactgcaacctctgccttctgggttcaagcgattctcctgcctcagcctcccaagaagctggggttacaggcgcccaccaccacacagggtggtggaggttcagcgagccgagatcctgcaactgccctccaccctgggcgacagagcgaaactctgtctcaaaataaataaataaatgaaaataaaaaaataaaaggagtcttctggccaggcatgatggttcatgcctgtaattccagcattttgggaagccaaggcaggaggattgcctgagctcaagagttcaagaccagcctgggcaacattgcaaaacaccttctctaccaaaaaaaaaaaaaaaaaaacccaaaaattagcagggtgtgatggcatgcacctgtagttccagctactggggaggctgaggtgggaggattgcttgagcccaggagggtggaggttgcagtgagccgagattgtgccactgcactccagcctttatttagacactctgtctaaataaataataaataaataaaagtaatcttctgactgttgtgttgagaaggaagtgggggaggggaggccaaggagacccacttagaaggatgttgaagtaatccaggagagagatgatgagggctcacagtgaaggcagtagttacctggagagggagctgtgagtggagagaggcctttcacaggaccccctgctagcaatatgtttcttgatttacctgtgtgatgactacataggtgtacttttttttttttgagagagagtcttgctctgtcgcccaggctggagtgcagtggtgtgatcatggctcactgcaacctctgcctctcgggttcaagtgattctcctgcctcggcctctggtacagctgggattacaggtgtgtgccaccacaccaggctaatttttgtatttttggtagagatggggcttcaccatgttggccagcctggtcttgaactcccgactcgaggtgatctgcctgccttggcctccgaaagtgctgggattacaggagtgagccaccacgcccggccagacatgtatgtttatttacttatgttctatttcacaataaaagaagaaataaagcaataacatgaggaacatagctataaatggctgggacacactggaatccaattctagcactctttatcctgctaatcgaacccaaggaataggccccaacccagctcacttatatccttgtgctgtagcctggagcaaaccttgtcatttctctcagcctcagagtttctcatctgtgaaaccaggaaaccactgactggctctttacttcactagggtgttgtcaagctcacagtgctttataaattgccagaaagcacacattatgattggtattttatggtttttgttttgttttgtttttttgagatgaaatctcattcttgttccccaggctgaagtgcaatggcacgatcttggctcactgcaacctccacctcccaggttcaagcgattctcgtgcctcagcctcccgagtagctgggattacaggtgcctgccaccatgtccggctaatttttgtatttttagtagagacagggtttcaccatgttggccaggctgatcttgaactcctgacctcaggtgatccgcccgcctcggcctcccaaagtgctgggattataggcataagccaccacgccaggccttattgtgtttttaaaacagctttcttaatatataattaatgtacaataaactgcacataaagtgtacaatttgatgaggtttttggtcttttttttgagatggagtttcactgttgttgcccaggctggagtgcaatggcacgatcttggctcatcacaacctccgcctcccaggttcacgtgattctcctgcctcagcctcccgagtaactgggattccaggcatgtgccatcacgcccagctaattttgtatttttagtagagacagggtttctccatgttggtcaggctggtcttgaactcccgaactcaggtgatccacccacctcagcctcccaaagtactaggattacaggcttgagccaccatgtctggccaatttgatgagttttaatacatgtatatacctgtgaaacaattaccacaatcaagataatgaacatattcctcacctccatgagtttccctgtactcctttgtaatctacccctcacttccctactgccatgttcccaggcagttagtctgcattttctagaattgtattttatttgagatgtgatgtcactatgttgctcaggctggagtgcagtggcctgatcatagctcaaccgtgttagccaggatggtcttgatctgcccgcctgggcctcccaaagtgctgggattacaggtgtgagctaccacacccggccacatttaaatatttctagttaatttttgtatatggtatgaggtaaggatcaaggtttagactaggcgcagtggctcatgcctgtaatcacagcactttgggaggctaaggtgggtggattacctgaggtcagaagttcgagattagcctggctaacacagtgaaaccctgtctctaccaaaaatatgaaaattagccgggcatggtggtgcacacctgtagtccctgctacttgggaggcggaggcagaagaatcacttgaacctgggaggcagaggtggcagtgagctgagatcacgccactgcactccagcctgggtgacagagtgagactccatctcaaaaaaaaaaaaactcaatatttatatttagacaggcatggtggctcacatctgtaagcctggcactttgagaggccgcggtgggaggattgcttgagttcaggagttcaaaaccagcctgggcaacatggcaaaaccctgtctctaccaaaacaacacaaaaatcagctgggtgtggtggtgcgtgtctgtagtcccagctactcaggaggctgaggtgggagggtggcctgagcccagaaagcagaggttgcagtgagtcaagatctcactactgcactccagcctggtggacaaggccaactctctctcaaaaaataaaaataaaaattaattaaatacatatttacattaaaatatttccagttgatttttgtatatagtgtgaggtaaggatcaaggttttttattttggattttgtctttccatatggctatccaattgcttcagcacacatttgtggaaaagagtatcctttctccattgaatctctttggcaacttcattgaacatcaattgatcatatatgtgtggatctatttctgttccattaatccatatatatttacatatttatgctaataccattaccgtagctttaaaataagtcttgaaatcacagaatttaagttctcttttgttcttctttttcaaaatggttttggctattttaggtcttttgcatttccacataaatcttaaaatcagcttgttaattactgaaaaaaaaaaaaggctgctggggccaggcacagtggctcatgcctgtaatcccagcactttgagaggctgaggcgggcagatcacctgaggtcaggagttcaagaccagcctggccaacatggtgaaacctcatctctactaaaaatacaaaaaattagctgggcatggtggtgtgcacctgtaatcccagctactcaggaggctaaggcaggagactagcttgaaaccgggaggcggagattgcagtgagccgagatcacatcactgcactccagcctgagtgacagagtgagactccaccataaaaaaaaaaaaaaaaaagctgctggagttctgattggaactgcactgaatctgtagatctcttccttgcaggaggtttttttctgattaatcctggttgctccagcaacagtcctcaactcatcaatgagcccaccttaacttagaacaggaccagtttcactgcaggtccttaaacctgttgctgctccttaaacaccctgtgaatgtacacacctccagcctttgcacatgttatttccttttttttttttttttttgagacagggtcttgctttgttacacaggctacaatgcagtggcccaaacatggctcactgcagcctcgacctcccacgctcaagtgatcctcctgcctcagcttcctgagtagctgggactacaggcacacgccaccacacccagctcacttttgtatttgtggtagagacagggcttcgccatgttgcccagactggtctcgaactcctgagctcaagcgatcctcccacctcagtctccaaagtactgggattacaggcatgagccaccacacctagctctcattctctacttacgtctactgggctccaccatactcaccctcagctcaaatattacccctctatgaacatgtctctaacccatcccagaccctggctgaatcattcatttgcctgggtttcacaccactttgtcctcatctccctcacaggcacacagaacttttaattactagttaatatcacttaagtggccgttacttgtttatacatctttctcccctattagataaaactccttcaagcagggaccatattatttcttatattttgaattaaaccttttgagataatcatagattcatatgcagttcataagaaataaatacaaaagagatcccatgtacccttttcccagtttctcccaatggtaacatccttaaaaactttagtacaataacacaaccagaaaattgacactgatacaatccactgatcttactcaaatatccccagttttacatgtatgccgtgtgtgtgtgtgtgtgtgtgcatttgtagttaaagacatctttttactatttaaactttaacaatgacattaggacgttttggaagtaacgtagtaaaggcagttaagcaagctacttagggtatcgttggagcccagaagaagcacctagtccacttttggaggagtggtgatggtgagggaatggggaaggacgtcagaatatgccttggtcaaggcccgctactagtagctgctcaaataactgcgttaaattatgttgaacccaacgttattttccatgttttcttatgcaaatcctcgcatccctgagtgttccattattttcatatttatttggcaggtggaacattcgaggctgggagcccttacatgccccgcgagaggtcacgcagttaggaagtgacaggagcgaagtcagcccaagtctgctgactccaagcccagtgctctctccccctaatggcggtacgccgtgcacatatccttaccacgtatgcctcatccctattcggaactttgcctccaaccctcttcctgttttcttggctgtcttacaagggagccttttcaggcagcaactccagagagaaccgccagagcgtgcaacagcaaacactaaccagcccagccgtcagccacgcaatcatcactccctggcccagtgcgcggcagaactggcgcaagcgcacgccggcaggttgtacccagaatccgggcccttgccagacgggggcggaaccggaagtcgctgtacatctcatggttgctaagaaacggagcttccacaaaccagatagaggttctccagcttttctttgattgtctctgctttagcgtctctaaatccggtcaccatgtcggaccccgaaggcgagaccttgcgaagcacctttccctcttatatggccgaaggcgagcggctctacctgtgcggggaattttctaaagccgcgcagagcttcagcaacgtgagtcgagctctcaacctatccatcaccccatcacccgtcactttttttttttttttttttttttttttttgtgacggagtttcgctcttgttgcctaggctggagtgcaatggcacgatctcggctcgccgcaacctccgcctcccgggttcaagtgattctcctgcctccacctcccaagtagctgggactacaggcgcgtgccaccatgcccggctaattattttgtctttttagtagagatgggggtttcactgtgttggccaggctggtctcgaactcctgacctcgtgatccacccgcttcggcctcccaaagtgctgggattacaggcgtgagccactgcgcctgccccctgccctcaccttttgattgcagataacactgaggtcttgatgatgcctggaggaccctgttgtttctattattcactgatttttgatggacacactgctgtcacagataagccctgtggttggccattttctaccagttcccacttgcaatctccattctctgcgttaacagtgaccttttcctccacttttacttaaatgtttcatgattaaccggcctccttccacagagcagccttaccttcccatcatttgctggcagattggatgggaggttgcatgcagaagcctcaatgtccccagcacaccgttgcttataaaaggtggccagtaagcaacatatgattattattatcaattttgagacaaagttttgctatgttgcccaggctggagtgcagtggcaagatctcagctcactgcaacttccgcctccccaggttcaagcgattttcctgcctcagcctagggagtagttgggattacaggcatgtcccaccacgcctggctaatttttgtattcttagtagagacagggtttcaccatgttggccaggctggtgtcgaactcctgacctcaagtgatacacctgcctcggccccccaaagtgctgggattactgaggtgagctgctgcaccaaccagcaacattattatagtaaccctagtataaattgcatcatcccaccctaaggggattgggtgatggtttttgttgttgttgttgttgttgttgttgttgttttggagacgtagtcttgctctgtctccaggctggagtgcaatggtgcgatcttggctcactgcaacctccacctcctggattcaagtgattctcctgcctcagcctcaggcacactgctaagcagactggatttttgttgttgttaagatggagttttgctcttcttgcccaggctggagtgcagtggcgcaatctcggctcaccccaacctccacctcccaggttcaagcgattctcctgcctcagcctcccgagtagctgggatcccaggcatgcaccaccatgctcggctaattttgtatttttagtagagacggggtttctccatgttggtcaggttgatctcgaactccccacctcaggtgatccccccccacctcagcctcccaaagtgctgggattacaggcgtgaaccaccccacccagtgcatactcaattttatagattaggaaatatacagaagttgagcaacatgcccaaggtcgctaaactagcaagtggcagaggaaggattcaaagccgggctcagactccaatgctgaggtgctaaccacaaaactacacatctgacatctgcataaggaaactgttgttttttttttgtttgtttgttttttcagagacaggatctcgttctgtctcccaagctggaatgtggtggcacaatcacagctcaatacagcttcaaactcctgagctcaagtgatcctcccaccttagtgttccaagtagctggagctacaggcttatgccaccacgcctggctaattttttcttttcttcttttttttttttttttttgtagagataggtgttttgctatgttgccctggctggtattgaacacttgagctcaagtaatactcccgctttggcctcacaaagtgctaggattacaggtatgagatacagtgccctaaaaacatgtttttatgaccatttcttttgctccaaattgcccacttcttctgctccaaattgcccacttcttcttctagatggagtgataggataaccctgtagttttgagacttcctgtaagatcaagcttctcaacagctccccagagtcgtttgtccctttcagtcaccaaccacaccctaaaaccagaaatgatgaccagataagtgaacaattgagttcggtagccctgtccccacttattctcctcctgctggatcatgtcccatcctgaagtacccaccagcagagaaaaaagaacaccctgagggaagggtagccttggatgagaagcagtcactttccagaaagacagtagctacttcctcttcttagaaaagtaggaaggtcttagaaaggggtgggtaccaggagacagagggttgcagtgagccaagatcatgccattgcactctagcctgggcaacaagagtgaaactctgtctcaaaaaaaaaaaaaaaaaagaccaggtcaggtggctcatgcctgtaatcccagcactttgggaggccaaggcaggtggatcacctgaggtcaggtgtttgagaccagcctggctaacatggtgaaaccctgtttctactaaaaatacaaaaaatcaaccggacgtggtggcgagtgcctgtaatcccagctactccggaggctgaggcaggagaattgcttgaacccgggaggcggaggttgcagtgagccgagatcgtgccattgcactccagctttggcaacaagagcaaaacgccatctcaaaaaaaaaaaattagccaggtgtggtggcgggcacccgtagtcccaggtactcgggaggctgaagcaggagaattgcttcaacccgggactcggagattgcagtgagcagagatcgtgccactgcactccagcctgggtgacagtgtgagactctgtctcaaaaaagaaaaaggggggtgggtacagttagatgcctcaggaaggacagtacaccacagactatggtaatcatctcacacagaaaagaggacactgggagtggggatattgccctcaaccccactttagggtcaaaatcagtttcattttcctagcattttcttttttttttttctttcttgtttttcatttttcttttccctttctttcttttttctttctttctttttttttttttttttttttgagacagcgtctcactccatcacccaggctggagtgcagtggcatgatctcagttcactgcaacctctgcctcccaggttcaagcgattttcttgccttagactcccgagtagctgggattacaggtgcttaccaccatgtctggctaatttttgtatttttagtagaaatgggtttcaccacgttggccaggctggtctcaaactcctgacttcaagtgacccacccaccttggtctcccaaagttctgggattacaggtgtgagccactgcacccggcctctttttgttttgttttgttttgttttttgagacagagtctcattctgtcacccaggctggagtgcagtggtgtgatcatggcttatgcagcctcgacctctccaggttcaagcaatcctcccatctcagcctcctgagtagctgggactacaatcatggaccaccacgcccagctaatttttttgtatttcgtagagacagggttttgccatgttgcccaggctggtctcaaactcttgggctcaagcgttccgcccacctcgacctgccaaagtgctgggattacaggtgtgagccaccactcccagccttttcctggtattttcatcttaatccccggatatagtgattagttcttgattagctacataaaaagagaaggctactggaatggttaagccacatggcagattgtcctcaagtccacttcagaatgcttagcctttgaaatttgctttgagtatgatgtgttgccatttcaggtttgtagttgagtttggtgtgcacaaaataccctacagttctattgcctgaggggactgaggggctctcagacattggtggaaagtcagcgtatccacagagcagcatattcctactcttcagccagtggcttccacaatagccatgatttgaccttgttcaaggtgagccatatgcagataatcaagttgactgagcgcagatcggagttgttctgcttaggagccagaggcctgtgtgctggcctgaagaatccccttgattcttcagagccttgatttcttcagagcctgaagaaatcccctctgcaggagggtttgggctgcccttcccactccagcttctaccttgctcttcatgctggctgtcaacctgactggtttctttgtcaggctctttaccttcaggatggagacaagaactgcctggttgctcgctcaaagtgcttcctgaagatgggagacttggagagatccctgaaggatgctgaggcttcgctccagagtgacccagctttctgtaaggtgactgcatgggcgggaggactggatcctgccattgcctgtagcaacttctggttacaagtagttgttacaagtagaaccagccagactgcctagtgtttgatgccattttctcttcctaggtcattgcctaagtccctgccccctgtattccaaccttgaccttcaacccaggacccttctgttccaccacatgtgagtcctataaggccttatctgttcacattgatttgatttcctcccattccaggggattttgcaaaaggctgagacactgtacaccatgggagactttgagtttgccttggtattctatcatcgaggctacaagctgaggcctgatcgggaattcagagttggcattcagaaagcccaggaagccatcaacaactcagtgggaagtgagtgaccacagggcctatgcccttatccaggaaggtccttggaatccttaggtttagaggaaggttgagtcacagcaggtgagcagccaccaccaggcccgcagggagtcctacacctggatttggctgctgcagtgttgttgaggattagccgggcatggtggcgggcaccacctgtctgctgggaggaccattccctgatgcacacactgatctctgagcgctgcagccttgggttttcctaaaggtcagattagaagggctgtttcaaagtaggcctgtctttagcctggtgtcaaaagctataatgcggtcctgagcccagccttctatagtccctggcttctttcctcaccagacgcataccaagggctggccttagccatcagcattatggcagggggagaagggaagcaagtgagagcaagtgagagcttgctctgtcggtggcaaggcctggaaatggacagtttcccctgcatccttggcctccctttgtttggaaatctggctgccatagccttgggctagcgggggctgttagctcctaggagttataccaaacagcctgcaccatttgcctgctaggctggcttagggccagctttgccacagcctccaccatccccctgccaaaggcagccatttctacataaaaatatgtgataagtcatgcctggggggtctggccgacctgagctccagcttctttccttgcaggtccttcttccattaagctggagaacaaaggggacctctccttcttaagcaagcaggctgaggtaagggccctggttctgtggttgtatccctccaagggaagaggctatgtgtgcctgagaaggggtcttgggagtctagctgcaacctgaccaggcatactccgtgactcttggcccacagaaaggtcctggagttggaggaatctgggatcacagaccctagggccatggctgggtacactctgctccttgctgaagctctgttgggtgttgctccattttctcagaatataaaagcccagcagaagcctcagcccatgaaacacctcttacaccccaccaagggagagcccaagtggaaggcctcgctcaagagtgagaagactgtccgccagcttctgggggagctctacgtggacaaagagtatttggagaagctcctattggatgaaggtttcggacactttgttggcacggggccttgggggaaaggaaatctgggtggatgcttcatgcatgagctgaaggcagaacctgtcatataatattagctgacgtgtacctgtggacaggttttattagcattctcattttacagatgaggaaactgaggcgcagaccaacagaaactaaggtcatatataggtaggcaatgacatggcttatattcgaatccaggaagtccaattttagagcaatgctcctaagtgctatggtaccctgggagggaacaacagagatttggtctcctttaccaccatagtccctgaagggacatcccctttgccttcaatccttacaatgggcaaaggaatccagcggatatgtgcttaaatccgaggatattagttctagaatgctctgaaacatcatctggtccaagttctccttttgtagataaggaaatagagaccctgattgggaaggaactttcataagttgacaaacaagttcatggtggagtcaacatcagaacccaggcctctgacctccagtccagtgctctttcttttaaagacagagtcttgctctgtcacacaggctggagtgcagtgaagcaaattcggctcactgccacctccacctcctgggttaaagcgattctcctgcctcagcctccctagtagctaggactataggcgcccacaaccacatccggctaattttttgtatttttagcagagatggggtttcaccatgttggccaggctggttttgaactcctgacctcaagtgatctgcccacctcggcctcccaaagtgctgggattacaggtgtgagccactacacctggccagtccagtgctctttccaccacactgctgccagtgacaggatgaaggacagaagcctgagatgaatgtcccacatcaacatggggatgggagtattgccattagctgataagcctgagcagggtcacctgtgaatcaaatgcctcttctccagaattggcttcccaaggtcatgtgtagggttccctgttctgtgacacaggaacagcttcactgctggcacatctccttagcaacaggcctgaatgcctcctattctccagaggacccgctgcggagggaagaggtggcttgaatattacctcaagtggccttgtagctttgcttctggctgtaacctctggccaggcagtgggcaggacttgggcacccgccttccagcttccagcatgcacaggcccactgggcacctgggaaatcactgggcactggcagcctgggccagatcgtgcatttagactcagtgttatctgaggacacagcttgaactggggaagccccgaggcttctcagcgagccatccaccagctgccccttctggctagctcctcatatcttgccataaggggcccatagcatggaactccctgatagtggggctctggctgcctcctggcctggataaacccactctgccactatgcgcactcacactcctctctgtttcaacaactccaagcagagcaagttcacagagggccctgcagcggccaccgggaggaaacaggaggcaaatcccttagaggcctgttctccttggcgcctcctcacaccccttccccacagacctgatcaaaggcaccatgaagggcggcctgactgtggaggacctcatcatgacgggcatcaactacctggatactcacagcaacttctggaggcagcagaagccgatctacgccagggagcgggaccggaagctgatgcaagagaaatggctgcgggaccacaaacgccgtccctcacagacagcccattacatcctcaagagcctggaggacattgatatgtgtaggtgttgttctcagagggtggggcaggtgcctccagtgccttatcaggtggggaaggagcaaccaggtgtctgagcccctggtctctcagacctgcagatggtgtctgcaggaagaggagttaccctgtcagctaagaggaggctgccctggcctccacagcacccctttcctttctcagtgctcacaagtggcagtgctgaagggagtcttcagaaagctgagaaagtgctgaagaaggtactggaatggaacaaggaagaggtacccaacaaggatgaactggttggaaacttgtatagctgcatagggaatgcccagattgagctggggcagatggaggcagccctgcagagccacagaaaggacctggagatcgccaaggaatagtgagtgccctaggggaggccactggcgtgagcctacggagaaggacacctggggctatctgaggcccttgccagggctgctggtggcttgactcccattttctgctctgcatgcctgaggtagattctcctggaggtggggaccacctgcccaggactgagggtgggggcacctagactgttagcttttttgccaccaaaagggtagtggctcaaaattccaaaaagctacccaatgatctggctcttagggatgtttatattcttacatcagcttaacgagcatgcatgaagccccagacatgccagatgctgctagtgtgggaacacagtaataaccagacacaagggccatttccctgcagatgtcaagcaaaaagggacatagctaattaattgcaattgtgataagtgccatgaaagaaaagtacaggatccagtgtggtgagaaatacattccaggaggacttgatgacattggggaacacacagggcctatggaaaggccctgagacaggagggtacttaagcctggagagcacagcatattgccagggagaggggccaagaggaggctgaaggaagtgggcaggggatggatcaagcagggtcttttaaaaccggtgctgatcaagagcacgggctgtggagtcaggcagacctaggctgtggaacttgcaccgcccagccgtggaacctgagataagccactttagctccctcagcctcagggtctcctcctgttagctgggcaccctgtagggcagaagggaggatgaaatacagaagtacctgtgcagaccttaggacagtgcctggtatccacaatagtagtaacaccagctctccagaaatgagatcttctcaagacttgctgacttccacccggaggttccatcgctttctcagcatcctggttctaccctttggagtcattcttgacttcctcctgcctggtttctacccatctcaccagtctgagcctccttgatctcccatcatcccatttgccctcacagtgcccagccctcagccgacctgagtcctgctgcttcccctgcctctgctgtctctctccagctcctcccacaaatctccagagacacatgctatgaactctccctcccctgctcacaagtgggcctgggcccctcactgcctgcaggttaaaggtcaagcccctttgcttggccctcaggccctctctaaacccaccctggccctcttatagcaatcttcccttggggtcaaacgttcctgaacattcctgcctcctgccctttcctcttcactgatccaagccccatatgctttccattcccagttcatttctcgcctgcctccactgtgctgagcaggaatatcccatactggccatcccatattagaaaaaaatagctttagggacagacctgtcttcgatccctgtcttctaactggctctgccacttagaagctgtgtggatttgattaagttgctcctctactcagtttcctcatctctaatgaaggcataataataccaacccacagggactgtggggattagatgtgatgtatatatatggtaccttggatccaaccatctcccatgcacaaatgagttagaaatctttacttctcgccagacctctctcctgagcctcagacctgtgtgtccagcagattctaagacatttccatctggatgtcccacaggaatcctaaacttaacatgtccaaatcggaatcccttatcttcctcccaaacttacttcttgagggttccccatccccgaggatagcactgttggccactgagtcccaagccagaagaccggaggcttcccagatacctccttcccctctctgtttttgccatatcgctcaagttggtctggatgacaggcgtgagccactgcgcttggccccctcactgttcatgcccagcaatggccatgtcttgtcctgtccatactttctctgtttccctcccacaactcagtccagaccatccttacttcttgcctgtttcctctgacctgggcttcctacagttcagctgtcctttctctgaaaaacaactcctgtggttgggatgaaatttcaatgccctgctcaacacaggttgcccttcttcacttgacttctcctggcctgtcttgacctggctttctccaggcccccaggcattctgggccccagccagtgcagagctctgtgcatatcctccagccccaggaatgctttcccttttcccagcacttgctttatcaagctgccgccacccattcttcaacatttcaataaaggttgaaaagcctgcctcctagcctgagcggtggctcacgcctgtaatcccagcattttgggaggccaaggtgggtggatcacgaggtcaggagatcgagaccatcctggctaacacggtgaaaccccatctctactaaaaatacaaaaaaaattagccgggcgtagtgttagccgggtgtggtggtgtgcgcctgtagtcccagctacttgggaggctgaggcaggagaatggcgtgaacccaggaggcggagcttgcagtgagccgagatagtgactgggcgacagagcgagactccgtctcaaaaaaaaaaaaaaaaagagagaaaagaaaagcctgcctgctgccccaggggttacaaatccctcccctaggctccctctccacaggtagcctttctgtcctgttagactttggactttggaaggtgctattcccagcatctgccacacagtgggcatgtaatgaatgtgtgctaagtgactgaataatttgagatggagtttcactcttcttgcccaggctggagtgcaatggagtgatctcggctcactgcaacctgcaacctccgcctccctggttcaagtgattcttctgcctcagcctcccaagtagctgggattattggcagcccggctaattttgtgtttttagtagagatggggtttcaccatgttagccaggctagtctctaactcctgacctcaggtgatccgcccacctcagcctcccaaagtgctaggatgacaggtgtgagccaccatgcccgggctattagtttttaacatccacaaatgagcctcacccaggcttactccagtcttccttgtgagtcccatgtgctccaggagctccctcattctaatcagccacttgctagattagccacttactagtctaagtggttttttcagtgcccacggcactcatttatttctctgaataatctataaattatttgatcacatgctttatttttgctattatgatttttagtacatattgttatgaaaaatggacatattacagcttattcactcattcaactcgccagaacagagtacccactctagaagaggggatccactccgacgggctgtgacagcagcaggtgcacagtgtggcccaggggccaaggagacaggcaggtgggagcttggcaggggcctcagggaaggcagcagggtcagcaaggtgggcaagggggagggagaaggggaccttgggcagggcagaaagatgtggcagggatggaggacttggagaaccataggtaggttaggtgtggcagggctagggaccagggcctgcaggcagtgggaggtctggatgccatgcctcgaaaccggttcagccctcaggcactgaggcccagtgtttttgtgtgtgtgttttgttttttttgttttgttttttagcaacagggtattgctctgctgcccaggctggagtgtagtggtgcaatcatatttcactgcagcctccaactcctaggcccaagcaatcttcctacctcaccctcctgagtagctgggtctactggcatgaaccattgtgcccgcgttttgtttttacacaagtactataatgtcaggcttgcaggcttgaaccagaactgcgtggtactgagagcaaaacctgaaagttgtcccccgcaacccacttcccgtcacttcccaggatgatgttgttggaatgtgtcctctggctccttttcaatgtgtttacctacatactcatgtacatatgcaggattttttaaaaccaaagcagttccttgctatttttttatttttttaaaaaagaatatgtcttcctctcaaatataaccacaggccaagcacagtggctcatgcctgtaattccagcactttgggatgtcacacgtgtccatgtgaagagaccaccaaacaggctttgtgtgagcaacaaggctgtttatttcacctgggtgcaggcgggctgagtccgaaaagagagtcagcaaagggtggtgggattatcattagttcttataggtttgggataggtgtacaaaatacattcttaagggagggggagaatattacaaagtaccttcttgagggtgagggagaatatatcgtatcagggtggagcaggaacaaatcacaatggtggaatgtcatcagttaaggctattttcacttcttttgtgattcttcagttacttcgggccatctggttgtatacgtgcaggtcacaggagatatgatggcttagcttgggctcagaggcctgacatgggaggcttaggcaggaggattgcctgagaccaggagtttgagaacagcctgggcaaattagtcagatgtggtttcttgagcatatagacctagttactcaggaggctgagtcaggaggatcccttgagcccaagagtttaaggctgcagggaactatggaggccaggggtttgagaccagcctaggaaacgtggcaaaactccatctctattaaaaatacaaaaactgttgggaggccgaggcgggtgaatcacgaggtcaggagttcaagaccagcctggccaacatgaagaaaccctgtctctactaaaaatacaaaattagccaggcgtggtggcacatgcctgtaatcttagttactcagggagctgaggcaggagaattacttgaatcctggaggtgaaggttgcagtgagctgagatcgtgctattgcactccagcctgggccacaagagtgaaactccgtctcaaaaaaaaaaaaaaaaaattagctgggcgtggtggcatgtgcctggagtccctgctactcagtggctgaggcatgagagtcacttgaaccccggaggcggaggctgcagtgagccaagattgtgccaccgcactccaacctgggtgacacagcgagactctgtctcaaaaaacaaacaaaccccaaacacacatacacacacacacacacacacacacacacacacacacacacacacacacacacacccccccgcatacacagaaattgcctttcttagagcactgataacatttagattattttttttggccaggtgcagtggctcacatctgtaatcccagcactttgggaggccaaggtgggtagatcacctgagatcaggactttgagaccagcctttccgacatggcggcaagcttgtctctactaaaaatataaaaattagctgggtgtggtggcgggcacctgtaatcccagcaactcaggggctgaggcaggagaattgcttgaacccggcaggtagagttgcagtgagccaagatcatggcactgccctccagcctgggcaacagagtgagactctgtctcaaaaaaaaaaagtaattatttttaatgcttattattataaactgtgctttaatgactgttcttgtcacattatctttttgaggtagattcctagaaaggcaattgctggttcaaagggacatctttgcaagctgttgattgattactctccagaaaagtcctgataatgttcattcttggccccagggcacagatgtgccacatccttgctgggctggacattgtccctccaactgaaaccctgagtttctgaggccagggctcctgtctttgccttctttcctatttccacagtgcctagaacagctgatttctagtgaatggcttgttttgcttcttccccacagtgaccttcctgatgcaaaatcgagagcccttgacaacattggcagagtttttgccagagttgggaaattccagcaagccattgacacgtgagtgaccaagaattgcctcttccccacctccatggttagaacttctcaccataacatgaaaatttgtttccggtaataagaatccagcctgggcaacataggaagactccctctctacaaaaaaaaaaaaaaaaaaattagccgcgcatactgtcctgtgcctgtggtcccagctacttgggaggctgaggtaggaggattacatgagcctgggaggttgaggctgcagtgagacatgatcacactactgcactccagcctagacaatatgttaccagtggaaggtatccaagttattgccggtgaatctgtacaggtctgcagcaacctcaattcttgcctcctcagaagaaagaatttgaatgaggaatgggaatttattaaaaagctaggccgggcgcagtggctcatgcctgtaatcccagcactttgggaggccgaggcaggcggatcacttgaggtcaggagttcgagaccagcctggccaacatggcaaaaccctgtctctactgaaaaaatacaaaaattagccgaacacgttggcacgtgcctgtagtcccagctgctcgggaggctgaggcaggagaatcgcttgaacccggaaggcggaggttgcagtgagctgagatcatgccgctgcactccagcctgggcgacagagcaagatacagtctcaaaaaaaaacctttagggcaggaaagaaaggaacgtatacttggaagagacccaagtgggcactgagaaggacaaatgcagtgttggtgtttaaccttgatcctaggactttacaaactggcccctttcccctgattcttcccttagggttggctgcccatatgtgcagtgccctccttacccttgggaggtgagcacgcacagtgtgttgaggaagtggcatgcatgcttatctgaggctttcttcctctcaccagtggagtgccccccgaaggtcaagctccaccattttgtctcttaatgtgcatgcctgggaagttgcttctccctggcacctacattcagttaacactttagtgcgacaggtgtggaccatcaggaaatgccctctccatgacactggctgccaatttatcacttttttttgtttgtttgtttgttttgagacggagtctcactctgtcacccaggctggagtgcaatggcacaatctcagctcactgcaacctctgcctctaggttcaagcaattctcctgtctcagcttcccgagtagctggcactacaggcgcccgccaccacgcccagctaatttttgtatttttagtaaagacgaggtttcaccatattggtcaggctggtctcaaactcctgacctcaggtgattcacccgccatggcgtcccaaagtgctgggattacaggcgtgagccaccgcacccagctcaatttatcactattttattttatgttatgttatgttgtttttatttttattttatgttattttatttttgagaaggagtctcactctgtcacccaggctggagtgcagaggcgtgatctcagctcatggcaacctccaccttccaggttcaagcgattctctcctgcctcagcctcccaagtagctgggactacagttgtgtgccaccatgtccggctaatttttcttttcttttttttttttgagacggagtctcgctctgtcccccacgctggagtgcagtggcgtgatctcggctcactgcaagctccacctcccgggttcacgccattctcccgcctcagcctcctgagtagtggggactacaggcgcccgccaccacgcctggctaattttgtatttttagtagagacggggtttccccgcgttggtcaggctggtctccaactcccgacctcaggtgatccgcccacctcagcctcccaaagtgctgggattacaggcatgagccactgtgcccgggtgtgcattttccaaattaatattttaataataagcgcaggccaggccgggcgcggtggctcacgcctgtaatcccagcactttgggaggcagaggcgagcggatcacaaggtcaggagttcgagaccagcctggccaacatggtgaaacactgtctctactaaaaaaaaagaaaaaaaatacaaaagttagccaggcatggtggcgtgcacctgtaatcccagctacacaggaggctgaggcaggagaattgcttgaacccaggaggcgaaggttgaagtgagccgagatcacgccactgcactccagcctgggtgacgcagcaagactctgtctcaaaaaaataaataaataaaaaataagcacaggccaggtgtggtggctcacgcctgtaatcccagcactttgggaggccgaggtgggcggacctcctgaggtccggagttcagaccagcctggccaacgtggggaaaccccgtccctattaaaaatgcaaaattagccaggcgtggtggcacactcctgtaatcccagctactcaggaggctgaggcaagagaatcacttgaatctgggaggcggaggttgcagtgagctgagatggcgccactgcactctagcctgggcaacaagagcgaaactctgtctcaaagaaaaaataaaataaaataaaataaaataaaaataaaatggctgggtgcggtggctcacgcctgtaatcccagcactttgggaggctgaggcgggtgatcgcctgaggtcgggagttcaagaccagcctgaccaacatggagaaaccccgtttctactaaaaatacaaaattggccaggtgtggtggcacatgcctgtaatcccagctacttgggaggctgaggcaggagaatcacttgaacccgggaggtggaggttgcagtgagcagagatcttgccattgcactccagactgggcaacaagagcaaaactccatctcaaaaaaataaataaataaaaataaaaataaaaaatattaatttggaaaatacagaaaaatagagaaaagtattcagtctcaccacccaaagacaagtactaattctaatcctactcttttattgatactgtgttttttcattccaatcttttttgttttgatttttctctcatatattcttagtaatttttttctttctttcctttttttttttttgagacagggtctcactttgtcacccaggtgggagtgcagtggcacgattatagctcactgcaatttcaacctctcaggcttaagcgatccccctaccttagcctcccaagtagctgggctacaggcgcacaccactgtgcctggctaaattttgtatttttttgtagagatggggttttgccatgttgcccaggcttgaactccttggctcaagcaatccacccacgttggcttcccaaaggctggggttacaggaatgagccaccatacttggtaataatattcttaaacattatttatgttgtgtgtatgtgtgtgtgttttgagatggagtcttgctctgtcacccaggctggagtgcagtggcataatcttggctcactgcaacctccacctcccgggttcaagtgattcttctgcctcagcctcccgagtagctggactacaggcgcctgccaccatgcctggctaatttttgtatttttagtagacagacagggttttgccagcttgtctaggctgatctcgaactcctgacctcaggtgatctgcccacttcagcctcccaaagcgctagagacatgagccaccacgccagcctcaactgttgtattaaattccacattccataggtgttaccaaaatagtctcagtagtcttaaaatatctttatgcttatgaactccacccttgtatccaaaagaactggtagctggagaacaagttttattccgccacccagcaggaagccttggcatcctgtggcccagtgcatggttttgggggatgaagctgactctggttcttcatgtccccaggtgggaagaaaagatccctctggcaaaaaccaccctggagaagacctggctgttccacgagatcggccgctgctacttggagctggaccaggcctggcaggcccagaattatggcgagaagtcccagcagtgtgccgaggaggaaggggacattgagtggcaactgaatgccagtgttctggtggcccaggcacaaggtatgggctcagagatgaccaccctaccttttccagccttcaggcccagctcacaccagggctaggagtcttgtggactgagtttaccatcccagtgtttctccttcccagattattctgagagtggggataagccactctattttgaccagcacgtggtaagtgctttcattaagcaaagcttggttagagcttggggtaccttgagcctacctctgcccttgaggaggtcagctgcagacccacacagcatcgtgtcatcctcacaacagtgcccatgtattgagccactttccttctgccttggtactttttttttgttttgtttcattttgtttttgagacagagtttcgcttttgttgcccaggctggagtgcagtggtgcgatctcggctcattgcaacctctgcctcccaggttcaagtgattcttctgcttcaggctcccaagtagctgggattacaggcgtctgccaccacacctggctaattttttgtgtttttagtagagacagggtttcaccatgttggctaggctggtctcaaattcctgacctcaggtgatccaaacgcctcggcctcccaaagtgctaggattacaggcgtgagccaccatgcccggccctgttttgttttttgagacgaagtctcactatgttacccaggctagactgcaggggcacgatctcagctcactgcaaccttggcctcccgggttcaagcgattctcctgcttcagcctccagggtagctgggattacaggcgcgcaccaccacacccggctaatttttgtatttttagtagagacggggtttcaccacgttggccaggctgttctcgaactcctgacctcaggtgatccacccgcctcagcttcccaaagtgctgggattacaggcatgagccaccacacccagccagcattcttgtattgaatcattatgatgtaggtaggcattatcatccttattttagagatagggaaactgaggcacagagaggtccagtagactccccaagtcctatgagggaagctttttttttttttttgagatggagactcactctgtcacccaggctggagtgcagtggcgcgatctcagctcactgcaacctctgcctcatgggttcaaatgattcctgtgcctcagcttcctgagtagctgggattacatgtgtgcaccataatacccagctatgtctttgtatttttagagatgcagtttcactatgttggctggtttcaaactcctggcctcaagtgatccacccacctcagcctaccaaagtgctgggattacaggtgtgagccactgcgcctggccgaggaaaccttttattttttaatttattttatttctttatttttattttttgagatggagtcttgctgtgtcacccaggctggagtgtagtgacacaatctcggctcactgcaacctctgtctcctgggttcaagcgattctgctgtctcagccttccgagtagctgggattacaggcgtgtgccaccactcctggctaatttttttgtatttttgtagagatggggtttcaccatgttggtcaggctggtctcgaacttctgacctcaagtgatctgcccgcctctgcctcccaaagtgctgggattataggcataagccactgcacccggcctccaagggaacctttcagagtgatggaaatgttctaaaatgggattgtggtggccactgtacaactctgtaaattttcttcttttttttttttgagatggagtcttgctctgtcacctagactggagtgcagtggcacaatcttggctcactgcaacctccgcctcccgtgttcaagctattctcctgcctcagtctcctgagtagctgggattacaggcgtgcgccaccacacctggctaatgtttgtatttttagtagagacgggatttcaccaagttggtcaggctggtcttgaactcttgacctcgtgatctgcctgcttcagcctcccaaagtgctgggattacagttgtgagccactgtgcccggcctcaactctgtaaattttctcaaaatcattgaactttatccttacaagccggtgaactttatttatttatttttttgagaaggcgtctcactctgttgcccagtctggaatgcagtggcgcgatcttggctcactgcaacctccgcctcccggggtcaagtggttttcctgtcacattgagataactttaaattacatactcagttaaaaattaggctggggacaggcacggtggctcacgcatgtaatcccagcactttgggaggccgaggcaggtggatcacctgaggtcaggagtttggtaccagcctgaccaacaaggtgaaacctcgtctctactaaaaatacaaaaattagccaggtgtggtggcacacgcctgtagtcccaactactcgggaggctgaggcaggagaactgcttgaatccaggaggcggaggttgcagtgagcccagattgcgccactgtgctccagtctgggtgaaagaacgagactctgtcgcaaaaaaaaaaaaaaaaaaaaaaaaaaaaattagcctggccatagtggctaacacttataatcctggcactttgggaagccaaggtgggaggatcggttgagcccaggagtttgataccagcctgggcaacatagggagatctcatctttacaaaaaataaggcaacttaaagagacctcatctctacaaaaaataaaaattagggcggggcacagtggcccatgcctgtaatccctgcactttgggaggccaaggtgggcagatcacaaggtcaggagttcaagaccagcctggccaacatagtgaaaccccatctctactaaaaatccaaaaaattagccgggcgtggtggtgcatgcttgtaatccaagctgctcgggaggctgaggcaggagagttgcttgaacctgggaggcggaggttgcagtgagctgagatcgtgccactgcactccagtccaggcgactatgagactctgtatcaaaaaaaaaaaaaaaaaaaaaattagctgagtgtggtggcaggcacctgtgatcccaaatatttgggaggctgaggtagaaggatcacttgagcccaggttgagaccgcagtgagccatgatcatgccactgcattccagcctgggatacagagcgaggccctgaccctcactccaaaaaaaaaaaaaaaaaaaaaaaaaaaaacagaaagaatgaaagaataatcctgaatgatttactctcttgaataagcatgtgactcttctgcagacctttaatgtcagagtcccactggtcttgaaaggaatactgcgactccacatattttcagaattacacttaaatttcctttaagtgtaatagccttttttttcttcttttttgagatagagtcttgctttatcacccagactttagtgcagtgtcacgtccctgcattcatggctcactgcagcctcaacctcccaggctccggtgattctccctcctcagcctccccagttgctgggaccacaggtgcatgccaccatgcctggcaaattttttttttggtagagaacggggtctccctatgttgtccaggttgttctggaactcctgggctcaagcagtgctcccacctcggcctcccaaaatgctgggattacaggcatgagccgctgtgtctagccaagtgtaatggcgttttattttattttattttatttatttttgagatggagtttcgctgtttcacccaggctggagtgcagtggtgcaatctcagctcagtgcaacctctgccttccgatttcaagcgattcttctgcctcagcctcccaggtagctgggattacatgcgtccaccaccatgcctggctaatttttgtatttttagtagagatggggtttcaccatgttggccatgctgatctcaatctcctgaccttgtgatccgcctgtcttggcctcccaaattgttgggattacaggtgtgagccaccgcgactggctgtaatgaccttttaaagtctgacttatgaacacaagggcttattttccccatgggtctcaaagcagtgcttgggaggaggatagatcttggatatactcaattgtaaaagaaagcagtggtttgtgaagaccttggctggtaagcactttctcctttatgaagctcttggctaggtgaggtggttcacgcctgtaatcccagcactttgggaggccaaggtggaggattgcttgaggccagtagttcgagaccaggctgggcaacatggtgagaccctgtctctattaatttaattatatatatatatatagagagagagagagagagagacagggtctcactctgtcacccaggctggagtgcagcagtgcaatctgggctcactgcaacattgaccttctgggatcaagggatcctcccatctcagcctcccgagtagctgggactacatgcatgcggcctcacacccagctaattttgtatttttggtagagatcgggtctcactatgttgcccaggctggtcttgaactcctggttcaagtgatccgcctgccttagcctcccaaagtgctgggattataggtgtgagccaccgcacctagcctatgtatgtatgtatttatttttaattaattaatttttttgagacagtcttgctctgtcacacaggctggagtgcagtggcgcgatctcggctcactgcaacctctgcctctgaggttcaagcaattcttctgcctcagcctcccgagtagctgggtttacagtcgcccgtcaccatgcctggctaatttttgtatttttagtagagatggggatgtcaccatgttggccagggtggtctcgaactcctgacctcaagcaatccgcccaccttggcctcccaaagtgctgggattacagacgtgagccaccacgcccggcctgacatatgtatttaattttttaaaatgaaatgaagctctgagggctcaaatcaatcactcaatcaatctgctaatcatttcagtcccagctccagcactaattggcacggagagcccagatgagccgctttttctacgggttcagattgtacctgagtggggcctggactcgagacagctgaggttccagcagctggcccatggattgcatccagccctctgtgctttggtctgcatatcatttttgaaaaaaatgaatgaccatttaaaaaatatgaatttctggccgagcggtggctcacacctgtaatcccagcactttgggaggccgaggcaggtggatcacctgaggtcagggtttaagaccagcctgaccaacatgacgaaaccccatctctacttaaaaaacaaaattagccaggtgtggtgtcatgtgcctgtaatcccagcttctcaggaggctgaggcaggagaatcgcttgaacctgggaggcagaggttgcagtgagccgagattgccccattgcactccagcctgggcaacaagagtgaaactctgtctcaaaaaaaaaaaaaaaaaaattcgtcttccagaacaatctaaagatggagcaggatgcggttttctcctccactctggagacatatgatgtatgcactagactgcaccacagtccccttctctcaccaacgcctttgaatgaggcccaggttcctcagtcctggttctcgatggtgacatagcccaggaacacggtggaaaggatggtgctgagcagctcagtgatgcttccctggggcctgggtccgactacagctcacacaagcttctgatgggccctggcagtgctcgagtagccagaggctccatcatgcaccacacgttgtcacactctacctgtgttgtgccttctccccttgctctccagtgaagctgagagacttcgagtcagccgtgaacaattttgagaaggccctggagagagcaaagcttgtgcataacaacgaggcgcagcaggccatcatcagtgtgagcctttccacccgccgggcttcgggtgtcaggagtggggttgggtggtcaggccttcagttccccctcagcctgcttgggcgccattccacagccgtttttttgtttgtttgtttatttgttttgagacagagtcttgctctgttgcccaggctggagtgcaatggcgtgatctcggctcactgcaagctccgcttccgggttcacaccattctcctgcctcagcctcccaagtagctaggactacaggcgccccccaccacgtctggctaattttttgtatttttagtagagacagggtttcactgttagccaggatggtctcgatctcctgactttgtgatccgcccgccttggcctctcaaaatgctgggattacaggcgtgagccactgtgcccagccagaaacaaaaattttacaaaatatatttacctctgctacgtactctgcatgctgatatttcctattacattctgttttcttatttttatttatttatttatttattgagacagggtctcactcccgttggccaggtcagaatgcagtggcactgttatggctcattgcagcctcgacctcctgggctcaagttatcctcctgcctcattttaaaatttttttgtagagatgaggtctcactatgtcttgaactcctgagctcaggcaatccaccctcctcagcctcccaatgtgctgggattacacgtgtaaactgtacttagctttttttttttttttttttgagactgagtctcacttgtcacccaggctggagtgcaatggtgtgatcttggctcactgcaacctccgcctcccgggttcaaacgattcacctgcctcagcctcccgagtagctgggatcacaggcgcccccccaccacgcccagctaatttttgtatttttagtagagatggggtttcaccatgttggccaggctggtttggaactcctgacctcaaatgatctgtctgcctcggcctcccaaagtgctgggattataggtgtgagccactgtgcctggccataatttttgtatttttaatagagatgggatttagccatgttggccaggctggtctcgaactcctgaccttaggtgatctgcccgcctcggccttccaaagtgatggtattactggtatgagccaccatgcccggcctttttttttttttttttttttaaatagagatggggccatgtatggtgggacctagcctgggacccaacgtgttgctgggactcggcaacatggcgaaaccctatctctaaaaaataaaaaaaattagccgggtgtggtgactcactccagccacttggaaggctgaggtgggaggaccacttaagcctgagaagttgaggctgtaacaaggagtgatctcacccctgcactccagcctgggtgacagagcgagaccctgtctctaaataaataaataagtagagacggagtctcagtatgttggccaggctagtctcaaactctttgcctcaaatgattctcctgccttgacctgccaaagtgctgggattacaggcatgggccactgtgcctagccttattttcttattttctttttgctttttatgtatttatttttagacagagtgtctctctgtcacacagacttagtacagtggtgagatcatagcttactgtaggcttgacctcctgggctcaggcaatcctcacaccttagcctcccatctagatgggactacagatgcatgtcaccatgctgggggctaattttttattttttgtagactcagggtcttactctgttacccaggctggtatcaaactcctggactcaagtgatcctcctgcctcgggcttccaaagtgctgggactgagccactgtacccagccctcattttctcttatcagcagtccccaagctttttggcaccaggctccagttttgcagaagacagtttttccatggaccggtggtgggggaaatggtttcgggatgaaactgttccacctcagatcatcagacattagattctcatgaggagcatgcaacatagatccctcacgtgccgttcacaatcgggttctccctcctatgagaatctaatgccgccactgatctgacagcctaatgctcacttgccgaccctccgcttacctcctgctgtgtggcccggttcctaacaggccatggaccagtcagtggcccagggtctaaattgacgttaggacttgcagtttgaaaaataccacctccaggagacaagaaatctagtgtgatttcctcattctcttgcctaaaccttttattacttcctggctgtctctgttcctgactttttcccacaggggtaggaaggcactgggtaagctctcccctgtgggcctctccagcttcctgctggtcagtccccagcccccatcaccttgcattccagctccagccaataccagcttcctgtcttcctaaacaggctttcttttttcttttctttttttgagacaaggtcttgctctgtcacccaggctacagtgcagtggtgtgactacagctcactgcagccttgatctctgggctcaagagataagtatctgggactacaggtgtgggccaccatgcctggctgatatttttaatttttattttttgtagagatgaggtctcactatattgcccaggctgggcacttgagagctcctgcactcaagcgatcctcctgtctcagccttttaaagtgttgggattacaggtgtgagccaccacacccggcctaaacaggtttcttatgcctcataacatatgctgttatctctgcctggaatattctaaaccttcccttcccacctccttcacctggctaactcccactcaacctttaggtttcagcttagatgtcccctctttgaggcggccttctctgacccctcagtctgggtgaggagccctcacatcaggtttcacagccttgatatgtcccccatcaaagtccacgttgtgcacttgtaattgcctagacttccattgcttaaggaggcagctgctagccacgtgaggctaaagttaattaaaactaggctgggtgtggtggctcatgcctgtaatcccagcactttaggaggccgagatggatggatcacctgaggtcaggagtttgagaccagcctggccaacatggtgaaaccccatctctattaaaaatacaaacaattagccgggtatggtggcacacacctgtagtcccagctacttgggaggctgaggcaggagaatcgcttgaacccgggaggtggaggttgcatgagccaagatcatgccattgcactccagcctaggcaacagagcgaaactccatctcaaaaaaaaaaaaaaaaaagtaaataaaatgtaaaattctcagtcacactagccacatttcaagtcattatagccacatgtgaggccgggtgcggtggctcacacctgtaatccgaacactttgggaggccgaggcgggtggatcacgaggtcaggagattgagaccatcctggccaacattgtctctactaaaaatacaaaaaattagccaggtgtgatggcacactcctgtagtcccagctactcgggaggctgaagcaggagaattgcttgaacctgagagatggaggttgcagtgagccaagatcacgccactgcactccagcctgggcgacagagcgagactccgtctcaaaaaaaaaaaaaaagctacatgtggcctatgggtgctacataatacagatctagaatattcccattgtcacagaaatttctgttgaatagtgctggcctagactgtgtcaggaggcagagaccaggggagaaacttggaggtgctctgggctcccccaccccacccactcccagtgcatccaggtggacgcacaagcttagtaaagtctgcacaccaacttcacaggtgcacactcacccaggcctcttcctcctgcttctgaccagacagcttccttaagcccttcccacagccaaattccagagcaccactggcacgcagctggaccccaggaagtatctgctggagtgaagtaaacggggcccctgtccttggggagcttatgccatcattgaaagaagccagattgcataacttgtgggcagcaaaggggcatggcctcagggaccagcctggggtctgcaggcactgggcaaagagagcagggaccctgagaagtgaaggctcaggacactcccagtgggaggaagacctcatgctgtgctctgaaggacaaggatagcagagctggccaggccgaggaggggcaagtgcactgaagacgtgggaggtcggcgctgagggctggtggccggcagaagagagatcctggcctgggtcccagagctggggggttcccggtggcgggggatggtggtgacagagccccagacagtcagcacaccagcctggacttgaagggctgtggacagcagagaagtgatctgatcacctctgttttttgggaggcaggttcatggtgagctgtttgtgaggactgtggtaaggctaacactgccctctcatggcggagaaatcatacccaaaagaccccagcaggcgcagtctatcctctgccaccatacggcccagggaagcccaggcctagcatgttgtcgtcctcgtcataaatgccatgtccccagctctggcttccaggcgaagagcacccacctcactgcagccctgccagatgtaccatgcgccacatacttccatgtgatcgccctgcagacagacagcatggccgttcagttcaggaaatattcgccgagtgtagattggctccaggctgccaagctcaaatgtgtgcggccattgtcctagcccacaagaagattacaacgaaaggccagacacagtggctcacacctgtcatcccagcactttgggaggctgagggcaggaggatcacttgggtccaagagttctagaccagcctgggcatcatagcaagaccctgtctcttaaaaagaaaaaacaaacaaacaaaaaaacagttactcaggaggctgaggcaggagaatggcgtgaacccaggaggcggagcttgcagtgagctgagatcgtgccactgcactccagcatgcatgatagagcgagactctgtctcaaaaaaaaaaacaaacaaacaaacaaaaaacaaagcacaaaccctggttcatgaccagtgccataggggactaggggaattcagagtgagagagccccagctgggaggcagagctggaggctttccaacaaggaggatctgaggtcaccttgaaggctaggcagtagtttgaagggttaggggcagagagaaggtacctgtgaccctcactgactcctcatgggaccaggcccccgacccctcaccctcctggattggcaactccaggtaggaaggctcacagtgggagggaggtggggggtgggcagaccaacaccacaagagagtgcatccaggccccggagctgctcagtagacactaccatgtgtagctggtgttctgtcagtgccagccacgggcctgctatgagcaagaaggcaagacctgccctccagaggctcacaggggctccaggcccctgtggatcatgcactcgagttggggaaactgcagacattctggaaggcccttctgaaggcaggccagcccccagcctgtccccttggtgtgtttctgggtcttttcagtgctgccttgctgagtgcttgcaggtttggattgtctttttgcattgactgaagccaaaagcagctttaggtagttcatctaaaggtagaaatgagtagatagacacaactcccaatacatgcctaagccaaagagaaatgcatttgactgactcgcagtcatgtatctcccagacacaatttgtgtggatcattctgagtcagtaagtgtagattaacctgagggtaggggtcattggaggggccagagggaaaccaagggtggcaggttcccaccagagccctgccttctgggattgatctgggtggggaaaattaatggtgtaggtgccaaacacaggggctaagctccctctaccatccacaggccttggacgatgccaacaagggtatcatcagagaactgaggaaaaccaactacgtggagaatctcaaagaaaaaagcgagggaggtgagttcctgaaactctgaaaaggcaacttcagcattctccctctgctttcttttcctctagtccgagacacatgcgacagcagctccccaatctgggggcttggcactgcccatcgtgcattctaatttcagtgccaccagcagccctagcctatctctggggcagtagagggtgaggattcagcccaccatgggctggactgtctggccccagagcgcactcatttctctcttcaattgattcatcaagtatatggtgagcacttgtcatgtacctggaaggtgttagattctggggagagaggcccatccctgccctggaggagcccatggccctttgggcaaggctgaccagtggagttgtcagctgctgggatcctgcacacaggtgctacaccgaggtggaggtgtgctgccatgagggtgcatgcaacggggcgtgggctcctctggggaggcagaggaggcttcgacgaggaaaaatcttctacctccaactccaaaagatgcccaggagttttccaggagagaagtgggagaagaaaggcatttttccagcagggaacagcagggccagaggcacagagacagaataacagtagctacactttgggggctcttactgtgtgctaggcactgggttaagcaccagacaggagtgatcttgttgggtctttaccccactaggaggtgtaggtgctgtggggggaaagggaggctgagtgaggtgagtgctctgccagagtcatgtagctagggaggggtgactcggggccccactctccccacctgcggcgctgctctcgggccagcagtgtgatgggcaggtgcagaggggcataaggtgcagaggctgcctgacagctgtgccttaccacattctttctcacaaggtctccagggagtaaacaggcctttggccccctgcctttgggctctcctttcctgcagggagggagtgagggaaggagaagcagaagatggctgagcagccctaccccactggagaggggcctagaggaacaggggtgttaagcgcagtagccgacccccattcatgcttcccgcaggccaggcattctttcaaagactgtgtgcacggactcatcctatctgtatctgttcaggaacactatgaaggaagtgttattagcttgactttatggaggacatggaggcagaggggttagaggctacagtggttttcagtcttgggcagtctgctctagaacccacgcgtcggcccgtgccacactgtttctagtgacacagacagccttttcctgccccagtctgtggagctctcactccagccagactgcagtgaacagagctggggctggaggtccgggaggacagagcccaatgcagattcttggctgcagccctccaggctgcaaggctgaaatcctttctggtccaggcagggcagcgggaggtttctgggcacctgagcagccagatgacagccctttattatccagcacctgctctgtggtggctggaccccctcagaggggctctgtctccgcccccacatgccctttgagctgctctgagaagccacaggagcaacagctgtggagagagactctgcggggaagcagccaacaccccagtctccctaccctggcctgcgtccttgtgcctggagaactgccgggcacgtccctctcagaacagcaggtggcagcattgcatctgttttcaccaccaaagggctgtgaccccctgagacctgagaccctctgcagatacctcagtaactagtggtttccaggaggagaatgtaagggagacgcagaaggggatgtaacttttctccataactgataaaaaaaaaaatttaggagcaaggatccctttgcttgtaaaataactcttcagctgaactttttgttagcagcgtatatctttataggaaacctatctttttccttatgttttttctatattttcataggaaacctcccaacaaataatgaatgtgcttcccagggacaaagagaaagtgtcagaatgaagatgctggagaaaatccttctgtcattttccagcacctatgctatttcttgcagggaaaagaggtgttctggggtcagactgtcctgggttcaaattctgtctcacttgcacacttgcagtgtgaccattgtgtgatttcttttctttctttttttttttttttgaaacggagtcttgttctgtcatccaggctggaatgcagtggtgcaatctcagctcactgcaacctccatctcagcctcccaaagtgctgggattacaggcatgagccactgtgcctttttttttttgaaatggagtctcccctctgttacccagtctggagtgcagtggcgcgatctcagctcactgcaacctccatctcagcctcccaaagtgctgggattacaggcatgagccactgtgcctttttttttttttgaaatggagtctcccctctgttacccagtctggagtgcagtggcgcgatctcggctcactacaacctccgcctcctaggttcaagtgattctcctgcctcagcctcctgagtagctgggactacagtcttgtgccaccactcccggttaattttttttttttttgagatggagttttgctcttgttgcccaggctggagtacaatggcacaatcttggctcactgcaacctccgcctcctgggttcaagcgattctcctgcctcagcctcccaagtagctgggattacaggcgcctgccaccatgcccagcttatttttgtatttttagtagagacggggtttcaccttgttggccaggctggtctcaaactcctgacctcaggtgatccacctgcctcggcctcccaaagtgctgggattacaggcgtgagccatgccgcccggccgtgtgatttcttttctatcgatctcaggtcccttgactgcaaactcaaatcaacggcagtgcgcattttcatgatgtctggatgggataagctatacagccctcacgtgatgcacaggacggagctgggctcagtcaatgatggttccctttctctgcttttggaaaggtgtgctgtcaacaccaatttaaagagctggcaaaaacagtcattctcagggcctttctctcatcggcctctcaaaagcacaggcctccacagagatgaacagtttctttcttttttttcttctttcttttttggagacgggtcttgctctgtcacccaggctgcagtgcagtggctggattttggctcatcacagccccaacctcctgggctcaagcgattcttctgcctcagcctccgggtagctgggactacaggcgccaaccaccacgcctggctaatttttgtatttttagtacagacagggtctcactgtgtcgcccaggctggtctggaactcctggcctcaagggatctgcctgcctcagcctcccaaagtgctgagattacaggcgtgagccaccgcacccggcctgacatgaacaaacttttatctttcttcccgcttttctcttatttttcagaagcttcactgtatgaagatagaataataacaagagagaaggacatgaggagagtgagagatgagcccgagaaggtggtgaagcagtgggaccatagtgaggatgagaaagagacagatgaggacgatgaggcttttggggaagctctgcagagcccagcaagcggaaagcagagtgtggaagcaggaaaagccagaagcgatttgggagcagttgccaagggcctgtcaggagaattaggcacaagatcaggagaaacaggcaggaagctactagaagctggcagaagagagtcaagagaaatttataggaggccttcgggagaattagagcaaagactctcaggagaattcagcagacaggaaccagaagaactaaagaaactttcagaagtgggcagaagagagccagaagaactgggaaaaacacaatttggagaaataggagaaacgaaaaaaacaggaaatgagatggaaaaggaatatgaatgaagccatcggtagagatgaggatcaggaagctggtgttcagagggatcatgggattttattaaactggattttcaagcgatttgtctgttataggaaaaatgagggttttacttctgctgctttccatcactattttgccattaaataggtgtctttcactcttgcaaaccctgagtctgtcactttgcctcttcacccctgcccattcttggaagagcatcgtggaagaaatgagaaaggtgccaagaagaaagggtttcaggagggtgaagatacgggcgctacagggaacaagaagtcacagggaggagaggggaaggcctgggaggagaggtgcttcccacacaccggtgactgactgagtccctccagtgcgcaggacagcggggaggctttatggatggaacagtggtggggcggccccagctgtcacaggtaggagaatgccgcaagccagaaccaagcgaatgctgggagtgaggccaaagataggggagtggcctgggagtcgggagggcagacagactccgcctctgacacctctgggtggcataatcaggtaaatcaggctctccaagctggcttctcctctgaacaatgggatacctgcctcaggggttgctgcgaggactgagtgcttagcacagcacttggacaggaaactcaaaaatccaacggagctctcagtggtttcacagaggaggtggcagctgaggatctggcctcagaggatgttaggatttcactccgttactcatctgtccctttggccattgccatcctggtctgtctccacagctcctagaaggaaaggtcggggctgagactgactttcggctggcacagggcctggacgaatgaggccagtgaggcatttcagatgcagagtttaccggaatgccagcaaattgcatgataatattttaatccaatgtggtaaaaaaaaaagtttttaattaatgcaaaagtccatgatgaataaaatatcaaaaattaaagacaggatccgactttgcacgaccctgcctcactcacttcctgctaatccacgggaccggggagggtgactgagttacccctcaacacgcagaaaaagctagtggccgctcagctcgcaggcgcagtgggtgggtgcgcgtggggagcaggcgcgcgcagggggcgggaccgggccgaggttcccgcgcgcggcgagagtttcgggttttggttcgcagcgcctgcgcgcagaggagacggcccgcccccagcccgcccgggtgcccgctccgccccccgggctatgtaaagcggccgggctcgggtcgtgccaccgctggactcccgtgtccctccgcgcaggcgggcggccccggagcgctggtgccggcagaggcggcgacggtggcgcccctcctcatcatggtgagaggccgggcggggccgggcacggggtagcaccagggcgggaaacgagtgtcggggcccctcgggaggaagcgtcttgcaaacgaggacccggggctccgggttcgacttccagttttcttggtactcagggcggccctgaggtctgggagaagcggaggggttttggggtgccggagaggccgctgtaaagggaaacggtggtgtttctcaggagggaactcgggaccgcagaagctgctgcgcctctgggagcctgggtgggcctgggccgggagcccgggagctgctcccgaccccacgcaggcccgcgctggggcagccgcttcggcgccccctccccgggcccagtctcatcacgcggaaccgctgccccgcgcccgggtgcgggcgggaggtggagccagttcagaggaggggaccctttacggtaaaagctgccgtcccttgtggcttctagaagataggaaaacaagtggctccgagaggcgcttctgacacacagcacagcggcgggtagagctggatcctaattgcaggtgccctgtgctgccctgttctggacaggcacaaagaccacgactttgtgggggccgggagagggtagaggaggaggtggcaggcttggtgaaagagggcctttgtccagtgctctcctgccctgccccccaccagcccttctgtgggaccattgtacccgcatgccagacaagagagtattatctgttgcggccattgttgggggaagggaggcagtcttggggtaacccttctccactcccccccttctctgtgcactcagccgtggcagctgtggcttggcccagacacagagacccccacctccaaagaggacgtccttagtaggtgccaagcatataagagtgaggccagtcccagaaccgcaggctcctggcgcgccccgcatgcctccagcacgtttacctttccgaagtggcaggaatggggaaagcgcacgcttaggagagcttcagacaagcttccctcttcctcctccacgaccagaagcggaaaggtgctcccggaccgaaagggaaagaaggtccagcactgccccgcttgggaaggcacccacaaccagtctagggactaggggtaaggccggcggggagcccgcgaatgacctgggctgacatctcttcccctccttacacagaacagaggcttctcccgaaaaagccacacattcctgcccaagatcttcttccgcaagatgtcatcctcaggggccaaggacaagcctgagctgcagtttcccttccttcaggatgaggacacagtggccacgctgctagagtgcaagacgctcttcatcttgcgcggcctgccaggaagcggcaagtccacgctggcacgggtcatcgtggacaagtaccgtgatggcaccaagatggtgtcggctgacgcttacaagatcacccccggcgctcgaggagccttctccgaggagtacaagcggctcgatgaggacctggctgcctactgccgccgccgggacatcagaattcttgtgcttgatgacaccaaccacgaacgggaacggctggagcagctctttgaaatggccgaccagtaccagtaccaggtggtgctggtggagcccaagacggcgtggcggctggactgtgcccagctcaaggagaagaaccagtggcagctgtcggctgatgacctgaagaagctgaagcctgggctggagaaggacttcctgccgctctacttcggctggttcctgaccaagaagagctctgagaccctccgcaaagccggccaggtcttcctggaagagctggggaaccacaaggccttcaagaaggagctgcgacaatgtaggtggcaggttggggccttataagcccaccttgctgggcacagggtgctgcgggcaaaggaccatcattgtactcaaaggatggagcacgaagcagcaggaggcagagagaggctcacctcagcgggggcaggggcaagcggtgcgtcccagtggtagccttggggagttggcagcacattgggaacacgggggcttcccagagcgcctttcctcccaccacacctatccttctagccctcttctctccgacacccttttcccagcctgaatgtagaccactgtcccttgtcttggaggtgggaaaaacaaattactgtagtaacaggaaacatgtcctcttctaatgtaaccttagagggggaatcaagcccagtgttttccaacgcatttttagcagcagaatcatgttccaaaaaataataataataatcacatgaaattgtaagctgcaaaaaaattaaaactaggactattgtggcttcactggggatggttctcaggcctcggactgctcaatttactcatgggtttgtggcatctgcagctccagaggacacaagtctcacacttaggccaaaacccgttttcagatggaaaaacatggacccaggagggatgtggggtttacgggctggaaccctggactctggccactctagcagggttctctcttggcatgggctttttgctccaatgataggtttgagataaagaagggtcctggtggctctcctggagtgacctgttggagaagtgccacccactaatccatctatatgcctttaggccatttctggttgcctccaattttatttatttatttattgtgacacggagtctccctctgttgcccaggctggagtgcagtggcgctatctcagctcagtgcaacctctgcctcccagattcaagcaattctcctgcctcagcctctcgagtagctaggactacaggtgtgcaccaccacgtccagctaatttttgtatttttagtagagacggagtttcacaatgttggccaggctggtattgaactcctgacctcaggtgatccgcttgccttggcctcccaaagtgctgggattacaggcgtgagccaccaccgcacccagccacccccaattttagatgatcttcatgcctgaaatagccccactctggtttgttgacattgtgtatattgcacagaagcagggaatttgtgcctgtatgggttctcagagagcttttttctcagctcctaaacttgaactctgcagtgaactgtggtgcttgcagtgacattggccaggagcaagccctgtacctgtgagctggtggctctgccctggagtgactactgctcaaagttgcttttaatatttatttatgagacggagtcttgctctgttgcccaggctggagtgcagtggcatgatctcggctcactgcaacctccgcctcctgggttcaagccaattctctgcctcagcttcccaagtagctgggaatacaggcgcctgccaccatgcccggctaatttttttttatttttgtatttttagtagagacagggtttcaccatcttgaccaggctggtcggtagcacaaaagaaaggaggggcccttggcccaagatgggacgaatcaagcttgacaggatgattgccagatcttttttttttttttttttgagacgggggtcttgctctgtcgcccaggctggagtgcagtggggcaattcggcttactgcaacctccatctcccgggttcaagcaattctcctgcctcagccacccaagtagctgggattacaggcacccgccaccatacctggctaatttataaatttttagtagagacagggtttcaccatgttggccaggctggtctcaaacgccccgcctcaatttcccaaattgccgggattacaggtgcgagccactatgcccagcctattttatttgtaaaggaaaactggatttttctgcccaggattagagcaggagaaatgtaatgggccagcaaggctgctctcaggagaggccttcctcccctgtggagggcgagacatcctcatggggactcaattcagaacataacaggaaaaagcgagtgactccaaagacagccacaggtgtggagtctggaaatcaaaatcacagatactccactcctctttgtgtcttccagccccataatgtcaccccattatagtccaagacccttcctgtaccaggaggcccccccataggcctgcaaggtgtgtattaaactgatggtgacgttgtgactgcttgtccagatgggcccctgagtgaaatggggcactactgatagttccctggtggtcctgggaacactggggtatatggtcaccctaactgttgtgctggattgatagatagggttggtcacttgcccgaggccgatggctggtacatggcagagctgagatattcactgtgttctggctgtttccaccgtaccatgttgttcccagccctctgttttctttccaccccacttcccatgacttgcttcccctttgagacgtggtgctagtaaatcttagattcccttggcctgtactgcctgcctctgttacaaatgccttagagtttggagaagagatggaaagatctatacaatgtaaagccagagaattttaacttttttttttttttttttggagacggagtcttgctctgttgcctaggctggagtgcagtggcactatctcggctcgctgtatcctctgcctcctgggttcaagcaattctctacctcagcctcccaagtagctgggattacaggcgcccgccaccacgcctggctaatttctttgtatttttagtagagacggggtttcaccatcttggccaggctggtcttgaattcctgaccttgtgatccacccacctcggcctcccagagtgctgggattacaggtgtgaaccaccgcacctggcctgagaattttaactttttattgctctaaagttgccattagtttgaccaactaaccaatgaatgagctgtagtgggttgctggagaggtgatgcttagtgtccgagtgttttgcgctgggcctcggtggtcctggtggcggatgttggtatgcccctgctcccctgccctgactgcacccgttttctcccggcagtcgtccctggggatgagcccagggagaagatggacttggtcacctactttggaaagagacccccaggcgtgctgcattgcacaaccaagttttgtgactacgggaaggctcccggggcagaggagtacgctcaacaagatgtgagtcttccccagggacacatgggggaggtgggaggttgggggagaaggggctgcagcatcttctgaagataggtaccggtgccaggcagggaccaaaaaccagatggcagctcaagaaaaatggcatctcctcctcctagctcccctgtccccaggcgtagctgcatagacctcagccgcaggttctaaggagcctgccctggcagtactgccagcctgtgcattcacctgcccccaagcaccttcgccttctgcagattcatggagaatgctggtccacagtgggctcctgctctggtctctctgagcctgttttaccttccaaagactaggagtccttcgcccccagggagcctggtgcactgaggtccccatccctgtccccaggtctgaggtctggcctggccccagagtgagggagtttcatacgataatgaagcttattggctaatgggtacgagacctttctgcaccacacagctggcaccttacacccacagccactgacagtgatccctgaatgccaggcatgtcacccatatccacagtctccaacttccaagtgtccacccccaagcccactctcccacttctctgcctaggttagcacaatcgtttgtttgttcactagagtgtcctcccaaatggaagctcccctgagggcgagtttttaagtttcgttgactcctgtggttccagcaccctagcatagtggaatgaatatgtaacacctgagctaccatccctaaccatgccttcatttagcatttattaactacccatttcatgccagacactgttgggacaagggatcgtgagcaaaaatagaaaagcgtttatgctgagatgggatgggctgtctcaaagaatcagatagaagcagacatatcatcagatgggaaccaaagtgtaagagcaggtttccatcaagggcgagtctgacctcagtctgacctcaccctgtcctccagggcgctgtctgggtcccaggggaagctgagcggtgccaacagtagcagctgttgtgtgcgcggacacccctgtgggctgtttacctagtcactctcataaccacattaactctgaggtaggctctggttctccctgttttacgggtgatgaagccaaggcaccgagaggtcagccagcccgctgaggccggaagccagtgtgcagggagctgggctccctcaggaagtccggctgtccccgtgtggccctgtctgagcgccttcgtgtttctcacttgagcctggagcgcctatggaaggtgcgtgccgcagttgttagtggatgctgggcctataccgacccctgctcagctgtgctcacttctgttagacttccccttctctcctccaggagggaccctccctgggtcagctgttcctcaagagcctgccatctctagcttgggcccctctttctcactctccccaggtgttaaagaaatcttactccaaggccttcacgctgaccatctctgccctctttgtgacacccaagacgactggggcccgggtggagttaagcgagcagcaactgcagttgtggccgagtgatgtggacaagctgtcacccactgacaacctgccgcgggggagccgcgcccacatcaccctcggctgtgcagctgacgtagaggccgtgcagacgggccttgacctcttagagattctgcggcaggagaaggggggcagccgaggcgaggaggtgggcgagctaagccggggcaagctctattccttgggcaatgggcgctggatgctgaccctggccaagaacatggaggtcagggccatcttcacggggtactacgggaaaggcaaacctgtgcccacgcaaggtagccggaaggggggcgccttgcagtcctgcaccatcatatgagtgttctcaccaccacttatgcccctagaagggaaggggagagggaaacgtgccctctgtttgatccttgttttgtgacattttttttttttttttttttactcaaagttaacctacctgtaactttttaaaaacttgtaaaataactgaccctcccttcctgtccgccctcttcccctctaatgctcacgctcccaacacaaggtgggcagggaggcaccattcaggaacctggaccaaagctgacgaggctgggccaagccagggatggggccacagccagaaccccgagccctacttccaggttctggttagctcagccccagcccagcccagctgctctgcccagagctgggtgagtggggagacacctcagagccccgcaaaacccactgaccggaggcaaaaggcagtggggctgggggtagttttccatggtcacagagaactagtggtggctctgagaaggggaggacctctgggctttgattccatctccttgtcttttttctttgtttttagagacagggtcctgctatttcccaagctggagtgcagtggtgcgatcatggctcactgcagcctcgaactcctgggctcaagcaatcctcctgagtgatcccatttcttaatcagtgtagccccaagaaggctggggctatttaccagggtagaaaaaggagcttacctcccacctttggtcctaagtccctgccccctccccttcacaccataactaggtaacagtttgataactagggaagaaagcagaacagttaagcagccgccacatccccgctggctgggggcctcactccaggaaggggctggactggctgtcctttccagtggcctggctccgctgtgtggatggggagatcggggccagaggcagaaccctggtgaggaagctccagtcctgctctctacccagcccatcttgcctccatggtgcctctggaggcctctgggcctcctctaacaggggctggtgggcaccaagagccaatggagtagacccctggctggtaagggccaagtcccaccggttgcttctgggaaggggtttctaacactagtctgtgtgctgtggttcctggggtgccctccactgccctctgttcagtaacagggccttgctaatcgggttgtcactcaacaaaagtgctttggatttaagttactatcctggctttgcccaacctcagcaacctgtaagactgataatgaaataaatcatgttaatcctagctgtgtgcagtctctcttacccttctgtgcccagctcagtcttccctagggctgggtgtattaggactggctttgtcccacagcttggggccatcggtcctgtctcccctctgctggccgggcacagctgtggtgaggttgggcagctgaacagtgttggctttcatgaggaggcagaaagcagaggctggcctcagactcatacagaaggtgggggttggctgggtacgagggatgtggagcacaaaagcctctcatcccccattaaccagggcaccaagcccacaggtgtccccagcccactggatcagaaagagttcagtaagaccggaagctcctggtatgggtttctcccagttctctagggaaggccacctgcaggtcactgaaacttcaagcaccagggaagatctaacatttgagtcccttccaggccatcagaggcctagtcagccacatgggaaacttccaagacctgactcaggcatcattccaccatggctaaggcaccagccggggaagacttgaaagaaaggggcaggagctcagatgaagagaaatcctaagttacctttctaggtcaaggcctgtccctggccatctctgaacttcagctagagcttcaagtctgtgcctggagctcctgggaaggctactcaccttgaacaccacgcttgacaggacagcatggtgcatgccgctgcatccgtgagcagtgtgtctcctgcatgcagaaagggagcagagaaggccaggggcttttgctaaaaatagtggccagaccagagctctggagccacctgtcccacctcaaatgggtctgggggtcaggaggcagggttttatctctgtctaccatctccctcgaacccacactgcaacaggaactgtgagagtctttgtaagtaaactgccctgtctaggtcagtacccacctgagctttggacgcacacagcttttagtacccacctgagctttggacacacacagcttctagtgatttctggggccccaccgtaaagtgagcatgctttctgaactcgcttctctgtgactgatgttaggctgggcccagaggcacagccggggcctgcctagcactcacatgctggacaggtctgggagaggcagagtgccccacctgccactaggctgggtgcccacagcccgcatgcagcagcttgctgcaccccaagtccaggtcgggctcagctctggctcacagactggagacaatgcagatgccagagcaaagggccaggaagggtcaaaacattttattctcttttttttttcttttttaataaagttaaacagtaaaacaaaaattcacaagctgcctccctgtccacccccgcctccctcccctgccctcggtcttcggcattggttccctttgctccaccccactcacagagacacagggcatccaactgagaaaacgaaactgctctaagcacacggagacgtgatgaagggaggaggtgaactgtttccacattcaagattaaactgagtgaatctgcattttctgggttctgggtggttgcccttcattagccaaattgaaaaaagaaattccctggaccagatgctgaaagagaaaagaggggttggtagttggctatggattttctaaggaagatcactttgctctgattatggaaaagtcttcaagggctgcttcaaactcaaacacagagagaaactctatgggtatcaaacagctcaggctgtttttgggtgcaagagggagcacgtgactgtattatacatgggtagcttctgacctcagcattatctatatagtacctttgctcttgcagagaagccttggtactaggcagttagagatgcctccctgaccctgcagagatgcggtggctaaaggtcccaaggcaaggggtgcctgggaaccttcctgtcttcatccttagcaacagccgagtggatagatgccctgctagatgagaattcagctgcccccgctcatgggcccctctgactcccaaagagctgcctaagaggcaatgagtgtgttggcttgtgatctgggaactcccaagaacagcaggcccacctaccttcaaagctgaagccgccaggaccgccaaagaatgccttgaagatattgtttggatcaaaatctgtagagcagggcaagtaacatggaagggaagaaaaggtgaaaaattagaaatgttcgaagagaactgatgacactgagaacagatctccaaagctttcctggagagtctcactcccctcctttcccaacacttcagactgcaagtgagcaaacctgccccatcccgtgcaaaacatgctacctgatcccactcctaggacatgttcccttctccttccaactgctgccccaaaggaagctttctctgcttcagcttgcttcattgggctgttttctcaacaaatggaatgccatttgcacttacacaagactttccccatactctgtctccctataatgctggagcggctactaaaaaggataaaatgtatcacttaaatgttaccaaaaataaatataagagcaagatctaggatttactgtatttgattccatgtcttttactccgtagactctaggctagaaaaaaagctatggtttattagctgggcgtggtggctcacacctataatcccagtgctttgggagtctaaggtgggaggatcacttgagcccaggagttcaaggctgcagtaagctatgatcacaacactgcaccccagcctgggtgacagcaagaccctgtcttaataacaacaacaaaccaacaaaaacacctactaggtgcaaagtactaggtactttgcatacattacattacttaatcctagtaatgttttgtcagggtaagtatcattcccaattaatactcaacaaaacatatgtaggtggttcaagtaacttgcccacgatcacatggcagcgaaagcagcagaactggaaaatccaactcctgcctgactggctctgtgcacttttgcaaggccacagcatgtctggtggccccatccctgactgactgcccaagcttcacagaaggactgacccccaccaggtgatcccacagccacctcgtgcccagagtgagtttctctgcttgcatctgtgtgtcttcctgggctcctggcttagtgaatgaccccgagtcagctatgcctgtcactttccccaacacatctgaatagcaaccaactcctgctgagtctaccactaactaactccctgactgtgccctccaatcctttcctaccttttgtgtcttccttccatctccattctccttactccctccaaccccaacctcctcacccctatcacaaatatatttccagagccaaaatctggtccacagtgcccctacttaaaacttcacggctggccgtggtggctcaggcctgtaatcccagcactttgggaggccaaggtgggtggatcacgaggtcaggagatcgagatcatcctggctaacaaagtgaaaccccgtctctactaaaaaaaataaaaataaaaataaaataaaataaaattagccgggcgtggtggcaggtgcctgtagtcccagctacttgggaggctaaggcaggagaatggcgtgaacccgggaggcggagcttgcagtgagcagagatcgcgccactgcactccagcctgggcgacagagtgagactccgtctcaaaacaaaacaaaacctcttcactagtttttgactgcttatagatcttcttaactgctaggcagaggaacatgtttattgtggtgaacctaggtttattaaacacaaatacccccacactgaactggagaggactcagcattatctatatagtaccatcattcttattttaaattccggctgggtgcggtggctcacgcctgtcatcccaacactttgggaggccaagatgggcggatcacacaaagtcaggagtttgagaccagcctggccaacatggtgaaaccccgtctctactaaaaatataaaaattagccgggtgtggctgcaggtgcctgtaatcccagctactcaggaggctgaggcaggagaatttcttgaacctgggaggtggaggttgccgtgagctgagactgcaccactgcacaccagcctgggtgacagagtaagaccatgtctcaaaaacataacaacaaaaaaaaattaaataaataaataagttgcaatggaaggccaggcacagtggctcacgcctgtaatcccagcactttgggaggccaaggccagtagatcacttgcggtcaggagttcaagaccagcccggccaacatggtgaaaccctgtctctactaaaaatataaaaattagctaggcatgggggtggatgcctgtaatcccagctgctcaggaggctgaggcaggagaattgcttgaaccctggaggcagaggttgcagtgagccaagatggcactactgcacccagactgggctcagtcttaaaaaaaaaaaaaaaaaaaaaaaggccgggcgcggtggctcacgcctgtaattccagccctttgggaggccgaggtgggtggatcacgaagtcaggagttccagatcagcctggccaatatggtaaaaccccgtctctacttaaaatacaaaaattagctgggcgtggtggcgcacacctgtagtcccagctactcgggaggctgaggcagaagaatcacttgaaccctggaggcggaggttgcagtgagtcgagatggtgccactgcactccagcctgggtgacacagcaagactccgtctcaaaaaacaaaacaaaacaaaaaacaaaatcccaatagattttcttagtggaagagatggtaggtctgttcaccattcacaggtcaggtcctctttttttttttttttttgagacaagtcttgctctgtcgccaggctggagtgcagtggtgcgatctcagctcattgcaacctccgcctcccgagttcaagcgattctcctgcctcagcctcccaagtagctgggactacaggcgtgcgccaccatggctagctaatttttgtatttttcatagagacggggtttcaccatgttgggcaggatggtctcaatctcttgaccttgtggtccgcccaccttgttctcccaaagtgatgggattacaggcgtgagccaccatgcccagcaaattttttggcagacaacttagagtgaagactgactgaattaattaattaatttttgagatggagtcgcactctgtaacccaagctggagtacagtggcgcaatctcagctcactgcaacctctgcctcctgggctcaagagtttttggtgcctcagtctcctgagtagcttggaccacaggcatgcaccaccatgctcagctaatttttttgtattttagtagagagtacaatttttttggtattttgtatgttgcccagggtggtcttgaactcctgagctcaggtgatctgcccgccttggcttcccaaagtgctgggattacaggcgtaagccaccgcgcccagctcacaggtcagggcctcttatctctgacagcccacagtgagcaacaatattgacaataggtgtgctttatatcatgctaaatctttttgggaaattaaaatctgtgagtgtttataggaatgtatgacatacataaatgtcagcatacactttgcagtgggtaaaaaagaacttccagataataggaaaatgctcatattccttaccacatacagcccttatggcctgtgagctctgatccagctacttgccggccttccaccaccacctgcctctagcaccctatccctttatcttccctagaccaagccccctgcagatccccaaagaggccatgctttgcttttttagtggggagggatggagtctcactctgttgcccaggctggagtgcagtagcgccatcttggctcactgcaacctccacctcccgggttcaagtagctgggattacaggtgtgcaccaccacacctggctaatttttcttttttctttcttcttattattttttttaattgagacaaagtcttgctctgtcgcccaggatggagtacagtgggacaatctcggctcactgcaacctccgcctcctgggtgcaagcgattctcatgcctcggcctcccgagtagctgggattacaggcgcccaccaccacacctggctaatttctgtattttagtagagacgaggtttcaccatgttggccaggctggtctcaaactcctgacctggtgatcaacctgctttgacctcacaaagtggtgagattacaggcatgagccaccgcgcccagcctaatttttgtatttttagtagagacagggtttcaccatgttggccaggctggtctcaaactcctgacctcaagtgatctgcttgccttggcctcccaaagtgctgggattacaggcatgacccatggggccatgcttttctgcacttccaagccttcccttgctagtgctcgcctcctcagagctcactgcacactgtgaacctgccacatttgactgcatttgtttgactccatgtctattactgtttggaccagggatcagatttggcccaaatagactctccctctggagcatctttggaaaaaattctaacattctacagctgtcaaattcatcccaggctgccccagccaactcaccacccatattcatgccctcctcatctaggtcctgtccactgtcatagcgagtctttttcttgggatcagagaggatagtaaaggcctctccaacttccttgaacttcttctcctcctccttctgaacctcagcactggctccactatgccgatctaaagtggggagtaaaagaacaactcagtggaaatcaaagtttcaagaaaacaaagtttaagagaaaaactactttctgtctaattttggaatttggcacttcccaaaatttggagggtccacaagtctgcaacaccttattctcagctgaaggacctctccaaggggtcccctctggactgagtgtggcagttggcctgccctgcgggttcttcccactgagcccactccccgcacctactctacctggatggtgcatcaaggcccgtttccgataagctttcttgatctcgtcctcagaggcattcttgtccactcctagaatcttgtagtaatctttcctcttactcttcttcagttccagctgcgcattttttaggagctgtttgtgttctacaggaagacatctggcatcagtggacaaatctgactctggttttttcctcaccaggtctcagcccagctgcctgggagttagaggccttgttaaccatgccagggacttttacggtgctttcttctggagattagaaaaaaaatctactcggccaggcacggtgactcatgcctgtaatcgcagcactttgggaggcctgcatcaatgagagatgcaggtaaatgagacagaaaagggaactctaaacacaggtttgcttctatttcggtagcacgaaagaaaggaggggcccttggcccaagatgggaggaatcaagcttgacagaatggatcacccgaggtcaggagttcgggactagcctgtccaacatggtgaaaccccatccctactaaaaatacaaaaaattagccaggcgtggtaccatgtgcctgtaatcccagttattcgggaggctgaggcaggataattgtttgaacctgggaggcaaaggttgtagtgagctatgatcatgccattgcactccagcctgggtgacagagcaggactccatcttaaaaaaaaaaaaaagaaaaagaaaaaagaaaatctacccagacttaggttcctcactttagcctcaccacacaaaaaatgaaatgaaaacgacagggaggatctggaaccagaaaataggtgcctcatgccccaacccaagatatctgttcactttttttttcttttttttgtttttgtttttgagatgaagtctcgctccgtcacccaggctggagtatagtcgcgcaatcttagctcactgcaacctccgcctcctgggttcaaggaattctcgtgccccagcctcctgagtggctgggattacaggcgtataccaccatacccacaattttttgtattttcagtagagatggggtttcaccatgttggccagtctggtctccaactcctgatctcaggtgatctgcctgcctcagcctcccaaagtgctggggattacaggcgtgagccaccacgcccagcctttgttcacttctttctggctggtgatcaaataagttctaggtagatccctgatccctgaatcaaactaccttgtgtacagatttatggcctacgaagtccacacagttccctaaaaaacaaatgcttttaaacttaccttttgttttctctgtctggtatactttttcatagtctcgtactgcttcttcatactgttctgtgtccatgtaactgagaaggaaatacaaggcaatacagcactaagacataaatagcagtggttctcaggatcactctagggcaagaggcatggctcaagcaagagacacacacttctggtaagatgcttcagaaacaggagcccttaatctagcagtgagagaaaattagctaacaagtcctcaaggaaataaaaagagaggtcgcatggcacttgcatccaaccagcaaagtgatgttcagctttgagcagaaagtaatcaagaggaaaaagttccttctgacacacagccacctaagaggtactggactgccttagaaaagacaatgtgaagggatctacttgattactttgggttgaaacacacaagagaaaaattatcaagtgaataaatgggtatgaaagagctttgaaacctatagtgccataaacatgcaggactagctacaatccagaatagaggtgggattagtgagccactaaaaggatcaagttcaacgtggcagctgctggcaaatccctccactaagaccaatcaatgagagatgcaggtaaatgagacagaaaagggaactctaaacacaggtttgcttctatttcagtagcacaaaagaaaggaggggcccttggcccaagatcggaggaatcaagcttgacaggatgattgcgagatcttttttttttttttttttttttgagatggagtctcgctctgttgcccagactgcagtgcagtggtgtgatctcggatcactgcaagctccgcctcctgggttcacgccattctcctgcctcagcctccagagtagctgggactacaggcgcccgccacctcgcccagctaattttttatttttttttttagtagagacagggtttcaccgtgttagccaggatggtctccatctcctgacctcgtgatccgcctgccttgacctcccagagtgttgggattataggcgtgagccaccgcacccggccgactgccagatcttttaagtgtctcttccacagaagcaagtggcattttccatgcccagataaaatcactggcaccagggctggcctaccaattgaagactgtggtaggagttccagagacagccactgtcagctggggaatgggaagtgatcatgcagtacagctagctgctgtacaacagagattcaatttcttacctgctaccacacaagcccattttctttcttttttttttttgacacagagtctcactctgtagcccaggctggagtgtaatggcacgatctctgctcactgcaacctccgcctcccaggtttcaagtgattctcctgcctcagcctcctgagtagctgggattacaggcatgtgccaccacacctggctaattttttgtatttttagtagagatggggtttcaccatgttggccaggctggtctcgatctcctgacctgaaccgatctgcccgcctcggcctcccaaagtgctgggattataggcgtgagccactgcgcctggcataagcccattttcacaaacatcacagatccccaccagcttggaggccagggcaggagagtgctaccaatgtggctggcaaaagagaagcccaacatcttgggcatctttgattttctggcatcattttgatttatgactttaaaaaaaccaatggcctgcaaatacaggacataaatattatattaggagttcagaatcaatgtacagaataaaatgtaataatttgaagtaagagaaatgatactttgatactgcactccagcctgggtgacagagctggatcctgaattaaaaaaaaaaaaaaaaggaaaattgatagctgatagccctgggtatagaatgatgtgacaaatgattaaccctgatgaactttctttaggtctatatgtaatgtattaaacaaactatactaatttgcatttttacttcatgctttttaaaattcagggatatcctcacattttaattttgttttaaagttgaagtagaaaagtaaatagggctttaaggagaaagggtgaactctagctcatgatggcatgtgtagcaaagatgtgggtgggtggcatctccccagctttaggggtaagttgaggcagactgcagcagtagtcaggccagatgtaagggtttggcccgagctaatctccagtacttcttgtcaattccagctgcttcaggagattgttgccaaatattcagccagctgaacagggcatgctgtctcccctgtagtgatctcagaggcagagccactccaagaagggcagttctgtttctaccacaaagataagaagttgtctgatcaaagcaattccttattttcatttcttgcacataaacaaagaagaaaataatccttcatccaattatcctccgagcaaatcaagaattttctatggtgttgggggcttgcttaaaaaaaaaaaaaaaaaaaaaaaaaaaaaaaaggccgggcgcggtggctcacacctgctggtaattccagaactttgggaggccaagacaggcagatcacttgtcatcaggagtttgagaacagcctggccaacatgatgaaaccccatctccaataaaaatacaaaaatttgctgggtgtggtgacatgcgccggtaatctcagctacttcggaggctgaagcaggaaattcgcttgaactcaggaggtggaggttgcagtgagccagtacggtgctactgcactccagcctgagcgacatagcgagactccatcccgagcgacatagcgagactccatcccaaaaaataaaacaaagcgatttttctcttctcttcccatcccctggcattccatatacagagcattccattaagttcatacagtatcaagtatctagccacccccttcccactggacatgtaggtgattctccccccgcctttttttttttttttttttgctattatagataaaattgcagcaaacaccttcatgtatatagcattttgcgtctgttaaagtcagtctttggctgaatcaaagggtgctttttttgtcttccaaagcttctgcttctgtgtgccagtggtttgcaaagatggaatgactgacagtcagtctcacagaagttataattccctgtatgtttctgttggacagacttagtcatcaacttagaaattcacttttaaaaaaagcatcacacacagcagcagttttcctattttaagtgagataattttgagaaaactaagtgggaggtagtccatgagatattctgtaccactgatgagacaaggaagcttaaactactggctcatcaggcatcagtgacagcatctgttctttggatatgacattttataataaggagtggagcaggtgctggaggattagtatacaataaatacatcttctctaagaactttaaagacgggaagtttttctccgcctagagaataatctgaaatcagaagagatggatttctgagaaagatttctcctagccctgttcctatctggagaaaaccagctggtgggtctaagagtaagaggagcaaccatgccagggagcaccctgactctggggcaaatgtgagcattagaggtaggcacatcctggctcataatcaccctgtcagacacagagtgccctccactcaaaacactcaagcagagagtagccatccagggtgtttcaaaaggaagttcctttatcctgggaggctgagccggattacatctcttccaactctaagattgtcttccctcgcccagaacaaacaggatgaagtacaactctcaactgtctccaagagttgttttctcttccaagcaccatacattcattcaacaaaacatttattcagtgagcacctatgtgtcaagcactgtgccagggtagagcataagtgtacaacacaaaataaaatctccaaaggaaatggatttaaactttttaacaaaaggaatttgggtcaggcatcagaggaaacttactgaccgtgaggggcgttagacacaggcatgggagactgagggagcttgtgcaatctcctccgctggaggtctataaagatagtctagggctggaacaatcccacctagaggcagggggaaggaccaaatgacctcacaacatctctgggtctgcttcgtcatccacaaggcaattcccctgaggccagcggcaactccctcttccccctacccatcagaggcacttaccactgagctcttctcaagtaggcttttatgtaagtgtcatcaagcttcactgcatttgtgcagtcttctattgcatcatctagtttcctaagcttcaggagagagagagcaatcatacttcacacctttggtgactgagggagcccagaagctgtgagcatggcttcaaaactctaagaggatcagtcatgctggccccttaaatgtcatattaagttctagttctttgtcaccagggctatggacagcaacttcaaaattgatttctcttgtatatgatacaagccaggcacatctgtcttcaaggataaactacctttaccattccatgttagtgcccaatgaaaacatgaaaatagtaaggctggttcctgccctccttttttccagaggtcacctgcagggatcagaaatcactctgatttttaactgctagaattctgcaagggcaaggagtctactttttgtttctgatgttgggtagggccacaaaagcactcaggccattttcaaccatgcatggtgaccatcaattacactggagaaaaacaagcttgcctcatactcttcctccaaatcactcctaaaaaataaatgatcacttgcataagcaaaacaacaaaaaagcaacagtaggtgcttaagattatcccacagaccctagccattctcttactggaggaaagggaccttaatgaacaggtgagaatatccttgcaaattgtccaactgccctcaaattccatagagatgacaaaagcttgcctcttggaagggagttcctaacaaactattaaccataacaactttccctctttcatcttgcttaccctcactaggcagatttcccaagaccctttgatgtcccttaaaaatatttctataggccccaagatctagatcaagagcttaccttggaattaaccgtaccccgattacagtagagtttagcatttgtttttatattgttggggtctatccccagggcttctgtgtacagttcatatgctagtttgtaatttccttccttaaatgctttattcccatcttctttctttgctttgagtgctttggcattctacagaaaaaagcaaggggaggatcggttcatatccacaaagcctcagaccattgcacagagaggccagactctattttcaagttctttgcttccagcagttcagcatcacagagccccgccaacccccaatctgggctatctgttgctcatttgagcttcctacagagtggacaggaaaagagttaccaaaaataccaatgagacctatgttactgggtctgccttcacttctcaggacaagtattactatctatcttcactgaggggaaaaacaaaacaaaaaaaccctcttagatattaaaggcatccgaccctatatgatcacatctacctttaggtaaatacaagtagtcctgaaaccatttctaataaagaccaagcatccttgcaaagcaggaggaaaagctatcacattccttgtgattctaaaaccttccactctagccatcttaaaggtcccaaaaggaagctctttcccagttaggtctggtgactagaacttactctgcaggcaatgcaggccttctcgtggtcaggagccatcctgagagcctgtacgaaaaactgaactgccttctcaatacaatcttcgtaataaaggcaaagacctcgtacatacagagcatctgcattggtggaatccattcgtagaatgtcactgcaatagtcagaaaagggcacattgagctgtgctttagaatgtccccaccattactaccatttgtggccagttttcctccttgaccatgtgtctagcattcaaaatatccaaaggtagacagattcccaagaactgttcccaaactttccccaaataaaccacctataattatctttaatacacatcttgtgtcttacaatccttattaaactagaacagggtttggcaaactacagcccacagggccaaatcctttctgccactggtttttgtaaataaaacactattcaaacagccacacccattggttcatctattatctagggcaacctttgcactgcaatggcagagttgagttagttgcaacagagaccctgtggcctgcaaaggctaaaatctggccctttgcagaaagtgtgccaaccagtggagtagaaggaaaaggactaccttaaacaaacaaacaaaaccacaaaaacacaatctgttctttcatatatagctcaagtacctgctatactactatactcctgtataccctacgggttttcaaagctggtctaatctttgactttaagtcccaagagggtctgatcagccctagctggcctactctggggaccatatcctgtggtgaagctgccggacaccatcagtccaatggtatctggcattttaatgtccagctagcctgactgcatacctagccacagactgtgcttctggataacgacccagcattgctaaacattctgccttgaggattttgaagcgatggcaggcaggggcaaattctagggcacggtccatgcagaaaacaacctgtagggaagaagaaaacaaataaggctcttcatcagggactccagaaacatcttcactttagtttagtcacaggtaacagactcaaaactcaatgaggtctttgggtccacttctaagtaatatcaaagtttaaaaacatacctaattcattaaataaaagcactgaaatgaggacagcaaaggctccagatgataatgaggacagtaaacatttactgggtactttcatatatgaacccatttaatcctcacaagaattttatgaaataggcaatattatcacttttttttttttttttgagatggagtctcactctgtcacccaggctggagtgcagtggcaggatcttggctcactgccacctctgcctcctgggttcacgccattctcctgcctcagcctcccgagtagctgggactacaggcgcccgccaccacgcccaagctaatttttttttgtatttttagtaaacacagggtttcaccatgttagccatgatggtcttgatcctcgtgatccgtcctcctcagcctcccgaagtgctaggattacaggcgtgagccaccacacccagccttaaaatagttattttaaatggctctaaataggctacatcagattactattcccaacatgccactatacaaaccacaagccaaggagcaatcacacacacaaaaaggtggggattaatttactctttcagcctcataaagcatctccatatattctgtttttctctttttactagtttgtcctctgagctttcagttttggtttagctgctatttattcctgggagagccttgctgaatcacattcacgccgagaataaatgaaccgaaggacaaatctggagttaagggacacctattccctctaagaatttggccatgggggtcaggaagagataaactctgaaaacttacaagcagaaaaattcaaattccatccacaggagactggttagttaacatggacattcatataatggaatactatatagttctaaaatagaatgaagaagctcttcatgtactaatatggaaagacttccaagagctactcagtgatttttttttaaaggtgcagacctgccataaagcatactacctttcacgctaaataaagggagaaaatcaaggatctttattttatataagtacaacaaaactaaggaagaaaatagaagacataagaacagtggttagcttaggggagtgagaactgggcggagagaggacaagtttgaggggacactcatcactgaatatttttcatactttctaacttttgtttgttttgtttttgagatggggtcttgctctgctgttcaggctggagtatcagtggcacaatcatggctcactgcagcctcgacttcccagactccagtgattctcctgcctcagcctcatgagtagttgggactgcaggcacacgtcaccacactcagctaaaattttaaattatctgtagagacagggtctcaataagttgcccaggttggtctcgaactcctcgcctcaagtgatcctcctgccttggcctcccaaagtgctgggattacaagcataagccactgcatctggcaacactttctagtttttgaaccatgaatagcacctattccaaaactgaaatttaaaatatgagcaagtcagtaaacactaccacattaccagctgtttcactgagaagactttctgcagtgtcacacagcagtgacaggaatgcctctccttcagtggcacaggtttactgtcctgaaagttttctgtttttttgttttttgttttttttgagatggagtttcgttcttgttgcccaggctgcagtgcaatggcatgatcttggctcactgcaacctctgcctcccgggttcaagcaattctcctgcctttgccctctgagtagctgggattacagacatgcgccaccaggcctggctaattttttgtatttttagtaaagacagggtttctccatgttggtcaggctggtctctaactcccgacctcaggtgatccgcccacctcggcctcccaaagtgctgggattacagccatgagccaccgcactcggcatgtcctgaaagttctaaggacaatatgaaaacttaagcattatgtaggtagagttgtgctaactgtcctgcccccccagatggaaaaggaatgagggggcaggaaaaagtcagtcaaaatgtcagcagccacaccctgttgccttcacaaggaccccgttttatgcagagctggttctgctaatcatggggatcgtcagtgcttcacttcccaccccccaacctccccatgactagggacagctgcaggcaaagaagatcttttgtttcttccaagttcatctgtttcccctgccaggatcataattcttcatttgtgacatcaccgtgagctacagtgggggggctgggatgtcacaaacagaggattctgtcacaaactcaggattctggctctggagtaggcaagagagaaaagaaacccaaaagaccacctctcaagacaaagcttttgcctatgtaaacctcagaaaactgacagtaggcagaattgctttccaaacacacacatgccaaacaaaacaaacttatgaattacattacaaagacaactgtggttattaaaaccaatggacagaagagggatgctaataagttactgccgggactctgcataagctaatcagatatatacattaccaaataaaagaccatcagtcaatgtgaatgattcttaatgtatcctcttatcaaaacatttactgaggccaggcgtggtggctcacgcctgtaatcccagcactttgggaggccaaggcgggaggatcacaaggtcaggagatcaagaccatcctggctaacacggtgaaaccctgtctctactaaaaacacaaaaaattagctgggcgtggtggtggccgcctgtagtcccagctactcaggaggctgaggcaggagaatggcatgaacccaggaggcggagcttgcagtgagccgagatcccgccactgcactccagcctgggcaacagaccaagactctgcctcaaaacaaaacaaaacaaaacaaaaacaaaacaaaaaaatttactgagcacatgctacaaaaagtactgagcaaattcccacatatgaagtgacaactctgttccttggatagtagtcacaaacttaagtgatccagaaaatctctcctgatcagtggtttttaacctttttgggggttatctacctccccttttgaaactcaagtgaaaactatttccaagcaccatctaaagaagaaaggagttacacagataaagcataataactgcgaggtctagaaagatatctagaacttttggccggggaggtggctcacgcctgtaatcccagcactttgggaggccaaggcgggcagatcacctgaggtcgggagtacgagaccagcctgaccaacatgcagaaaccccgtctctactaaaaaaaaaaaaaacaaaattagccatgcgtggcagcacatgcctgtaatcccagctactcgggaggctgaggcaggacaattgtttgaacctgggaggcggaggttgcagtgagccgagatcacgccactgcactccagcctgggcaacaagagccaaactctctctcaaaaaaaaaaaaggcctggcgcggtggctcacgcctgtaatcccagcactttgggaggctgaggcgggcagatcaggaggtcaggagtttgagaccagcctgaccaacatggtgaaaccccatctctactaaaaatacaaaaattagctgggcgtggtggcgcatgcctataatcccagctactcaggaggttgaggcaggagaatcgcttgaacccgggaggcagaggttgcagtgagccgagattatgccactgtactccagcctgggtgacagagtgaaactccatctcaaaaaacaaacaacaacaacaaaaaacaaaaacaaaaaacaaaactacaaaacttagccaggtgtgatggcatgcgcctgtaatcccagggtggctgaggcaggataatcgtttgaacccgggaggcggaggttgcagttagccactgtgctccagcctgggtgacagagtgagactaggcctcaaaaaaaaaaaaaaaaaaaaaaaaaagattatccaaacctaatatttaattccagcgggctttccctttattaagaagtacactattagaccagtgctttacatcaacaatagaaacaaactcaagtggcacactcattttaccttttatcatagggccaaatataattaagaaaataagtaccttagcacaaaacatttttaagaggaaaagtcagaagcctaatttaagtgataatttactattctagagcttttgtgccatactactcctcttaattatcacacacacacacgaatgggaattttgcgacaaagagcagatgagattatctcatggttgtactgtaccttccgaaaatctcgcttctcaaaatctgtttctgctattttctcatattccatgactgcattagcattcttgaactgcaccggaaaatcagacataggaaagttttaatgaagctgtagattaaacaaccacaaaaaaattaacaaggccttgatgaatttgaattcagtaaatataccacactgcctcttttgatagagatagggtcgaatgcatacctcctgttgtgaatggccatttttatgatccagttctagggctctctggcaactgcgacaggctgccatggcattccctagagagaggtggtactcgacctctcatagaagtccctaggagattttctttcaagaaaatcagaaccacagacatttcacaaatcaaattgatgaagatacagtcaagacttcttaacagaagggctagacccaatcttcaccctcagtttgaacttcaagtcaggaacacaagtgttatgcttgatatacatgaaataaaggcaatgcattgccagggattgagcatatgttttgagattctcactgaaatgcatctagggtaaactgtatatacagtcatacactctggtcaacaatgaactgtatatatggcagtgctcctgtaaaattgtaataccgtatttttactgtaccttttctgtttagatacacaaataccactgtgttatagctgcctacaatattcaggacagtaacacgctatacaggttttagtccagaagccactgccatatagcctaggtgtgtagcaggctatgccacccaggtttgtgtaagtatactttatgattctgcacaatgacaaaatcacctaacaaaatgtatgcctgtcattaagcgacacatactatatatggagatggaactaaaacatgttttagctgctaccaatttaatcaaggcttgaatttactcaaattcttttttatttttttgagacaggttcttgctctgttgcccgggctatagtgcagtggtgcgatcacggctcagcctcaacctcctgagcacaagcaatcctcccacctgagcctcctgagtggctgggagcacaggtaggtgcatggcaccaggcctggctaatgtaaaaaatttttttgtggagacagggtctcactaagtcccaaactcttaaattctttaacctcactcaaatcagtccctggaagcatttgcctattccccagctatctcagaaacacttcaattttcacagatttttaaaagctgtcaatcatattcaaaactcattttacagattaggaagctgaggcttagagaggctatgaaactcgcctaaagtcacccaggtgtgctgatggcagaagtgagactagacctcagttccgactttcaagtagccactcctcccaaatataccatactgcctcttttgacagaaacaggatcagacccgtacctcttgttgtgcctgagcatttttatgatccagttctagggctctctggaagctgcgacatgctgccatggcattccccagagagaggtggcacttgccctctcgtagatgtccctaaaagaacaccaagagggaagaaaagaagcatgattggccaagtggaaagaaatcaacagcagcaacagacacccacacaaaaccaacacagaggccaggcgcggtgactcacacctgtaatcccagcactttgggaagctgaggcgggcagatcactcacttggggtcaggagtttgagactagcctggccaacatgacaaaactccgtctcttactaaaaatacaaaaattagccgggtgtggtggcatatgcctgtggtcccagctactctggaggctgaggcaggagaattgcctgaagccgagatcgcgccactgcactccagcctgggcgacagagctagactccatctcaaaaacaaaaacaaacaaacgaacaaaactaacacaaaatgaaaatgactacagcagtagttctcaacctgggcaatgtgccctccaggggacatttagcaatgttaagagacatttttggttgttacaactgggcagagggggtgctactcatactcagtgattaaaagtcagagatgctgctaaacaacccacagtgcacagtaaagtcccccacaacaaagaataatctggtcccaaatgtcagtagtgtcaaggttgagaaatacggggctagagaaactcaactgtagcaacccagccttccccaaacagccccattacatacatacccggacaaaactgtcatccaacctcactgactgttgtgcatctccaagagcttcccggaaccttccaagcatcatcaaggtggctgctcgattaccataatagctagcatttttaggacacatatctataggaaaggcagaagaacgtaaaacaaagtttagaacaggtccctgctttgaaaacttagagggggctgggcgcagtggctcatgcccataatcccagtactttgggaggccaagaggggagaccacttgaggtcaggagttcaagaccagcctagtcaacatggcacaaccccatctctactaaaatacaaaaaaaaaaaaaaaatagctgggcgtggtggtgggcccctgtaattccagctactcaggaggctgaagcataagaattgcttgaatctgggaagtggaggttgcagtgacccaagagcacatcactgcactccagcctgggcgacagaggaagaccctgtctcaaaaaacaaacaaacaaataaacaaaaacttagagggcatctccctccaaacaatgttaagggaatctatctgtaacgctcataaactcttttttcttcatggagacagggtctcactctgttgcacaggctacagtgctgtggtgctatctcggctcactgtaacctctgcctcctgggttcaagtgattcttgtgccttagcctcccaagcagccaagcagctaggattacaggcatgtgccaccacgcctggctaatttctgtatttttatttatttatttgaggcacagtctggctctgttgcccacgctggactgcagtggtatgatctctgctcactgcatcctccgcctcctgggctcaaaccatcttcctacctcagcctcctaagtggctgggaccacaggcacacgccaccacatccagctaatttttgtattttttgttgagatggggttttgccgcgttggccaggctggtcttgaactcctggcctcaagtgatccatctgcctcagcctccaaaagcgttgggattacaggagtgagctattgcacccagccctgacacactctctttagaatgccacagccagcacagtggctcacacctataatctcagcactttgggaggccgaggtgggcagatcacttggggccaggagttttgagaccagcctggccaacatggcaaaacgctgtctctgctaaaatacaaataaattagccaagcatggtggcacacacctgcaatcccagctactcaggtggctaaggcatgaaaatcgcttgaaactaggaggtgaaggttgcaataagccaagattgtgccactacactccagcctgggtgacagtgacactgtctcaacaataaataaataggctgcatccaaatttctgactgcttgtgcaaatggacagcagcaaggatacaatcagttttaaaacaaaacaaggtacggctttgaagtgtagtgattatcttttgaggagagaggcagcttattaatcttaatgaactgttttgtataatgagacattaaaatgaaatgtgcatgttgagctggggtaagcaaattaggtgagaagaatgctgacacgggattaaagtatgctggcaaattaagcatggagataactaagacttcttttatgtacaaaggccattttctaaggtagtaaatgaattgacaatgactgaaatgtatttaggtgggttttgccataacattcagtatttctggaattgcctttaatttatcaaaagaaaaactacccaccccagttagaagaagttatcacagctggggatggtggcacatccctgtaattctagcactttgggaggccaaggtaggaggatcgcttgagcccaggagtttgagaccagccggggcaacatggtaagaccctgtctctattttaaaaaatttaaagagttaaaaaaaaagaaaagaaaaagaaaaaagttatcattcatgagtttgtttttttttttgagacggagattcgcgcttgttgcccaggctggagtgcagcgacgtgatcttggctcactacaacctctgcctcccaggttcaagcaattctcctgcctcagcctcccgagtagctgggattacaagcgcccaccacacctggctaatttttgtatctttagagacagggtttcaccatgttaacaggccaggctgaaatgaaatgtgcatgttgagttggggtaagcaaattaggggagaagaactcctgacctcaggtgatccgcccgcctcggcctcccaaaatgctgggattacaggcatgagtcaccacgcctggccttcatgagatcattaagcctgaaggagttcatacagtaacagttatcaacccattgggcaaaaggctacttctcagagagaagctacttttctcaattttttttaatttaatttttgagatggagttctttggtcgtcccccaggctggagtgcaacggcaggatctcagctcactgcaacctccacctcctgggttcaagcgattctcctgcctcagcctccctagtagctgggattacaggcacgcaccaccacacccagcaaatttttgtattttgtagagacagggtttcaccatgttagccaggccggtctcaaactcctgactttaggtgatctgcctgccttggccttccaaagtgctgggattataggcgtgagccactgagcctggcctattttttttatctttttgagatgaagtcttgctttgttgcccaggttggagtgcagtggcacaatcttggctcactgcaacttctacctcccgagttcaggcaattctcctgcctcagcctcccaagtagctgggattacaggtgcccgccaccaggcccagctaatttttgtatttttagtagagacagggtttcgtcatgttggccagagtggtctgaaacccctgatctaaagtgatccgcctgctttggcctcccaaagtgctgggattacaggcatgagccactgagcctggcctattttttttatctttttgagatgaagtcttgctttgttgcccaggttggagtgcagtggcacaatcttggctcattgcaacctctacctcccgagttcaggcaattctcctgcctcagcctcccaagtagctgggattacaggtgcccgccaccaggcccagctaatttttgtattttcagtagagacggggtttcgtcatgttggccagagtggtctgaaacccctgatctaaagtgatcctcctgctttggcctcccaaagtgctgggattacaggcgtgagccaccaggacttggcagctacttttaataatatttggcaagtaaatgttttctagcgtaagtatcagttctttctcacctatggcttttgtataataattataagcttcattgtaatctttcttggcatagtatgcatttccttgttccttgaaagtctctgcttccctgaaaatgaaagagaaagagaatcatgttactttacaaagggaataacctctgtaatcttacaggaggaatctttggtctagagcccgcagcacactgagctgaaagttagtgtgatacttgaaggatttatagatttgttgaataggccaatggaccaaaaggaggtgctaatgaaagaatccaagttcttcagatgctcctttttgtcacttagatacattcaaactaaatcaagaaaacccctcttatgttcctgcctcacctcactatttctgcctgtagtcatcctccccgcaggacaaatttagacattccctcatggcaaggaatttttctatctccttccacagtgtcacaactgctgcctcttttgcaaacttacaggaaaaatggttactccattcagggcaacttatttctcaatgtgaaataggtcacatcctcaagagttttaataatttcacctcctgaaaagtggctcatgcatttgtcactggaagaacaagcagagcaaaggcaggtggcaaaagagttaaaagcatagcatgttggtgtttaagacaggaacagagctgagtgacagcagagactaagaccgtggatgacagggacatatgaggtacaggatgccagtgccatactataaggagcacccatccactggtgttccctcttcccatcacaacaatgtaggtacttgctgccctctttgtactccctccagtaccttatatattcagcaactgggtgatagcagtattttttccctacctctaagatctattttttgaaactgtgccattagacaaagtatactttcctaaactttgtcctaaaggaacaatgttatataattgggaattagattcccgagcaagtacctagaatcaaatcagacatgaccaacagtgttttaaaagaactagtaacctctatcaagatactcaaaatcattccactgctcaagtgataaagataattctttactgaaatgattactgcaacattaactaagtacctgatcatttttgttatgagaaacatctttcttttcctgttgttcacatgcaaaaaagaacctagttcggggttgcctgaagttgaggcaaaagtcctagttcttaaaccttggtgatggtacagcaatttacagcttgagtctacggatatctgcattagggagatttgtgatttacttaagtattttaaactacaaactggtaaagtcgccctccttttattgaggtgatcctccctctccattcttctccatcactgtcctggcaagccctactaatatgaaaaggctgctagaaggagaaggcaaatgggaatgacctataaatgctgacagctgtgaaatgtgatggatataaatctgcttgagtaactgtctataccaactatcacaatgctgaaaagaggccttctgctatgaaaaatcttcaagaaagatcccccaattgcaagatttaaagaaccaactgaaatcttgctacatggtattcaccatcctgtaactctaaattaagcaaagtgcttataaaaactctcaggagcctatcctttaagagcagacatgccaagggatttgaacaaaggacttccccaaaactggatttcgattagtcaaactgctgtgaagaaatggagtagcaaattccaaagtaagacattaggcccaaactccatcagagaagatctagcctcttcttcagttggctagtggctaagaatatacaaatctttgaggaaaacgaagacatctaggtacctggggagacactgtgtcagcagtataaagcttgttagtcgaaagtgaaataatgtacagggctgctgaaaggtgcccctagtctcctccttcctaagacactacccctatggaggtcggggagttcaggactggcttctagaaaaaatgcaaaggatgattttggtggacagttactaataactactgaggccaggtactttccatacagtatcctctataaaacacagtccggtgaacttcattattcccatttttcaaaagaggaaataaggcctgggggttaaataacttgcctgaggtcaggatgttacccatgtttgtcagaatacaaagcttgtgcactttctactatgccaagctttctctctaatgcttgcctccgcttactgctaactattttgaaaattagtctgtactacgaggagtaagacatggacaatatatgtaagacatggacaatacatataaatttgtttaaactaagacacacagtacaccccacatgtaatattcaaccccagaaccaaaatcggtatttaaataagctaaatgacattcctaacaattagtcatagaggaagcagggctcctttctctttaagatgcaagacctagtgaactggactttgcctccccaaagaaatgcatttcattttagtaaatggtgagtagattccattctagagcaaacaaagcaagtaatgtagagtcagcccacagcaaaaagaacaagaagaattgtgttgtgacaagttgccatgtttttaacctcacactgcacagcatcaggccagaattagctattcccacacaactgcctcatgaaaaggacttattttcatagaaacgtggctgattaacagctgcctaaacaatgggcacttagtgcttttagactgaacgcttattttttgccttcaggtccaatgcccaaagtggactggagtccctccttcattttgaacctccccaccaaatacacaacaagctttaaccagtgggcctgaccctgcgagaccagtcgaggaaagagtggatctttggaatccagcatggcagcagcaagaactgaacaaggctgcatcaggaacaattccagtgtcaaatccattcaagtcctgccctggaagtctgagaaagggctgaagcttgttcaagttgcctttacagcaaagggactgaaggatgagatgtcaaaggcgtgggactggaaaaaaaggagaagagctggttaacactggaattgaaggcaatctggtggtggcatctgtcactcactcactgccagggtcaattcatctgatagccaagtgaggttgtaacatgcacctactgaaacacaccagtactgagaaaagaagacttaggattaattggcttcacctagaccaattaaaaaaaaaaaggattcccaatgcactaaattaaactacagattattttctgtggctacaaaattaaattcagattaaactcttaaatataataccacagcaaaatatagacttggccataactgacctgatggtactattaacaactacaatatatttctagtgttatttcagattttcgaagcatttccaatgaagattttcaattttttttttttttttttttttttagatggagtctaactcttttgcccaggctggagggcagtggcatgaactcggttcactgcagcctctgcctcctgggttcaagtgttctctcgccttagcctcccgagtagctgggattacaggcatgtgccaccatgcccagctattttttgtatttttagtagagacggggtttcatcatgttggccagactggtctcaaactcctgactgcaaatgatccgcctgcctagacctctcaaagtgctagtaggattaaaggcgtcagccaccacgcctggccaagattttcaaatggccttctgaggtggttatggcaataatttcacctatcctccaacagaggaagagctagtgaggcaaccaagatggctgcacaggtctcctaagtcctagaagtttatgttttcccccacatcctgttagtgtcaaggcttttagattaaaactaatttatccagttctcccaccaaatccttgggtcaacttctaagcagaatagcttcacagctctgattcaccaagagatgctgggaatgactccacctccaccaatccagtcttttcattttaactgacagtaataaagttgcatgaaaacagctactgaaaggttttccaaaaaaatctgtcctctctggatgcatggaggatctctcacaacaggatcagcacactggaagccctggccttcagagaagacatcccattcatggtctcctttgctattttaaaatgtatttctttgtttttcagaaataaccttgctgggcgcaatgtctcacgcctgtaatcccagcactttaggagacagagacaagaagactgcttgagtgcaggagttagtttgagaacagcctggaaaacacagggagactctgtctctacaaaaatttaaaaattagctgggcatggtggtgcaagtctgtagtcccaactacttgggaggctaagatgggaggatcacttgagcctgggaggttgaggctgtaacgagctgtgattgtaccactgcactctagcctgaatgacagagcaagactgtctcaaaaaaacaaaaccacccaccagtaagaaaactgcagctttgaaaacttgctcttctacaataaatgttcgttaaaatctgtatatcctttagacatgtagttacattatctctctcaattcagcattcattcattgctgacactaattactccaacaaacactgctaagggaatcatttggtatcacacaggtcttagcagggctcagcatcatgtgattaaatcagacaacttgggcttatggttgctagccaactttgcacatttacagctcaactaaattaaaaacacattaaaacatcatagttgacattgcaacatgccccaaattagatgccctataaaaatttccattttctctctaaatacttccaagttgaacacttaagatctctgcgttgggtcaactagtctaacttttagcaattaaagcatcaatcagaaactttagtcagcctacactaatgcagaattaattgtgtggtagtttttaaaatgtcattaacatggctgggttctctctggaattgcttgacatatcacgtatttgcagattattaaaacagggatgagattcttcatcattttaaaatttattccacctcactgcatgaaaaacagactagcatggtttcattattctgcaacacttgtaacctaggaaatgtggatccaaattttatatgacaaaaagcacaccgcactgtggtttgattttgttttttctttttttttgagacgaagtctggctctgtcacccaggctggagtgcagtggcgcaatcttggctcactgcaatccccacctcctgggttcaagcaattctcccacctcagcctccctagtagctgggattacaggcacacgccaccatgcctggccaatttttttttgagaaaagagctttatttatttatttatttaattttttttattttttgagacacagtctgactgtcacccaggctagagtgcagtggcgtgatctcagctcactgcaagctctgcctcccaggttcatgccattctcctgcctcagcctcccaagtagctgggactacaggtgcccacaaccacgcctggctgatttttttgtatttttaatagagacgggatatcatcgtgttagccaggatggtctcaatctcctgacctctgtcacctctgttacctaggctggagtgcagtggcgcaatctcggctcattgcaacccccacgtcctgggttcaagcaattctcccacctcagcctcctgagtagctgggattacaggcacacgccaccacgcctggccaatttttttttttttgagaaaagagctttatttatttatttatttatttaatttttgggaaattataggctcacgcctataatcccaggaggctgaggcagaagacctcctgagcccaggaggtcgaggctgcagcaaaccatgttcctgcagcctgggtgacagagtgagaccctgcctttaaaaaaaacaaaaccaggctgggcacggtggctcacgcctgtaatcccagcactttgggaggccaaggcaggcagatcatgaagtcaggagttcgagaccagcctcatcaatatggtgaaaccccatctctactaaaaatacaaaaattagccgggcgtggtggcatgcacctgtaatcccagctacccgggacgctgatgcaggagaatcccttgaacccaggagacggtggttgtgatgagccaaggttacaccactgcactccagcctgggcaacagagcaagactccgtctcaaaaaaaaaaaaaaaaaaaaaagtccaggcacggtggctcacgcctataatcccagcactttgggaggctgggcaggcagatcacaaggtcaggagatcaagaccatcctggctaacacggtgaaaccccatctctactaaaagtacaaaaaaggattagccaggcaaggtggcaggcgcctgtagtcccagctactcagtaggctgaggcaggagaatggtgtgaacccgggagatggagcttgcggtgagctgacatcgcgccactgcactccagcctgggcaacagagcaagatcctgtctcaaaaaaaaaaaagaaaaagaaaaagatacttttcttttcctttaggctattaataataatactttatactgccaatgagtcaatatcccttatgcattcctcttatatttactactccccaaatgtcgccttactctatgattgttgtgctccatttattttattcagtcaaacttactagttgcctgttgatctagaaatgccctccacccttcagaattcacgggatcttggccagtcagagtagaaattctttcctccttcccacagtccgagacctcttgtccccaatggcatgtcacagggcctgtttcatgttgcactctccctgaccttcatgacaaaataaagtaaaaggagcccaggagcctaacttctattccatcttaccaaaagcatatcatttagattcttctttaagaaaaaaatttctttttttttggagacagtctcattctattgcccaggccagagtgcagtggtgagatctcggctcactgcaatcttcacctcccaggttcaagcgattcttgtgcctcagcctccctggtagctgggactacaggcacgcaccaccatgcccagctaaatttttgtattttagtagagatggggtttcactatgttgcccaggctggtctcaaactcttgagctcaggcaatccacctcctcagcctcccaaagtgctaagattacacacatgatgagccaccacaattggccagaaaaaactgccttttttttttttttttttttttttgagacagaatttcgctcttgttgcccaggctggagtgcaatggcgtgatctcagctcaccgcaacctccgcctcccaggttcaactgattctcctgtctcagcctcccaagtagctgggattacaggcatgtgcccggtaagaagtttcttttttaaaaaaaaatctaggctgggcaaggtggctcatgtctataatcccagcactttgggaggccaaggagggtggatcacctgaggtcagaagttcaagaccagcctaggcaacatggtgaaaccccatctctacaaaaatacaaaaattagccgggcatgatggagggtgcctgtaatcccacctattcgggaggctgaggcgggagaattatttgaacccaggaggcggaggttgcagtgagccgagactgtgccattgcactccagcctgggcaagagtgagactccgtctcaaaaaagaaaaaaaaaaaaatctactattctacaagtgaaatgtcaatataagtttcacatagataagtggaagtcacaggtatagatatatatatatagatatagatttttttttttgagacggagtctcgctctgtcacccaggttggagtgcagtggcgccatctcggctcattgcaagctccgcctcctaggttcacgccattctcctgcctcagcctcccaagtagctgtgactacaggcgcctgccaccacgcccagctaatttttttgtatttttagtagagacggggtttcaccgtgttagccaggatggtctcaatctcctgacctcatgatccgcccgcctcggcctcccaaagtgctgggattacaggcgtgagccaccgcgccgggtcagacatatattttttgagacagactctcactcttgttgcccaggctggagtgcagtggtgtgatctcagttcacagcaacctctgcctcccaggttcaagtgattctcctgcctcagcctcctgagtagctgagattacagggccccactaccatgcctggctaatctttgtttattttagtagagatgaggtcttgccatgttggccaggctggtcttcaaacttctgacctcaagtgatccgccaatctctgccttccaaagtgttgggattaaaggcgtgagccatcacgccgggccatagatatatgacttggaataattctataaatatggcaaggtatttatgctcggtgcttcatccagaaaaaaatagaaggtgagcgctatccaactgctaccttttagcaaagctatctgctactcagctttctttacccaatttcctacagaatagatagttttcactttaaagcacaaatggaacaaccctccacacatctccgctaataaagagaaggcagaagatgaagaaaattccttaacataccagttcaaattgtcctctgggtggacattcaaggagaagcctcaacacgggcagagtcagaagggacccaaaatgcaccagaggagtcacagactgtctacacaaagcagcagcactccctactgttcaggcagggacggacaccagccagcaagctgtgcctggctatgcagctggctatgccttattcagtaaggaagaaaaagcaagcaaccaattcaatccctacagaaatcccatcactgcaggcagaaacatattcacttggaaatacttgtctcaacggtgagttggaaatttattttaggtccttaaatgagaggtgtcacaatctattacatctacctaaccttcacttatccctggggagaggagacccaacaatgaagctacttctgggaaacatgcttctctgaaaccattctgaggatacaagtcactggcttttcagcattagccagaggcttgttttcataacatatccccaaacccaccattttccatccctcggttccctattctgtgacatctcccactatagggacaccagcacccatcaaaaatttaaaactgaggaactacaattaaggaaaaggctgctttgccctggcgcagtggctcacgcctgtaatcccagcacttgggaggccgaggcgggcagatcctgaggtgatgagatcaagaccatcctggccaacatggtgaaacccgtctctactaaaaatataaaaaattagctgggcatggtggcatgcaactgtagtcccagctactcaggaggctgaggcaggaggatagcttgaacccaggaagcggagattgcagtgagccgagatcgtgccattgcacactccagcctggagacacagcaagactccatcacaaagaaagaaagaaagaaagagacagacagaaagagagaaagaaagaggctacttcctaggccgggtgcagtggctcacgcctataatcccagcactttgggaggccaaggcgggtggatcacctgaggtcgggagttcgagaccagactgaccaacatggagaaaccctgtctctacaaaaaaaaaaaaaaatacaaaattagccgggcgtggtggcgcatgcctgtaattccagctactcaggaagctgactcaggagaattgcttgaacccgggaggcggaggctgcagtgagccaagattgcgccattgcactccagcctgggcaacaagaatgaaactctgtctcaaaaatatatatatataaaggctgcttcctgagtttttttgggtggagtggggtggggtggagatgggaactagagtggggaggagcctggattgtcaacggtatttcacttctcaaagttgtcttggttccttagttcaacaggtggttaactgtctcagggcaaactgtccaaggaagaactctcaggacagaaactccaaaaacaagagagggtcctgcttgcccctcacactctctccaaaagtaatattagaatcaagagagatggttaacactgcttatctgacaatctggcctccccacacaaattgtaagtcacatgccaatagaatttcacgtctcagaataagacctgagagtcatatattcctcctattaccattctcaaaagcctcaaccactcatattcttacccatggtgagggtaaaacataggaattgccattttgatccgaatgggagaaggaaaaacagtgtcactccaataaaatgaatagcctgttaggataactgcactttgaattttgttcttacttcaaaagtttaaaagaatacctggaaagacctctgagtaacttccacatcactcagtgctggagaaaggggaccaaagactagtgcagtaagggagaaatgggctctcagagggactctgcatcaggccacaaagcaactaggcaactgctgactattgttctccaaacttctaaagtcccgaagaacaaaaaagcaagtgcccagtactcagcttttcaaaaccattaaaatacaaacttcaatgactaaactaatccctgattggctggaatgtacaataaggctgggctttcggccaatcagagttctgtttgttgggagtggactggactctaagcaactgccactcacttggccctatattttctcaaaattcttgtttctctggcactagttaacatgtggatctgaactaaagcactaagagagaacctttctctgtactctacctttgctccagttatgattatctactttgccatctgttagtatcagggttcaattaatttgccggtattgagaattctgtattcctaggtttatcccttccttaacttatttctcctcccatctcccatttcttcacatctgactacacttagtgcacagcaaaaggaaaatagtgtttctcactgatttgggttccaggtcaaagataaattcccactcagtttggaggcttactgaaatgtctaggtgcttgctctgaaacttcaagaggaagattagaaggacacattcctaagaatttaaaaccaggtaaggaagaaagctggggaggcatgcccacaagctcttcagttaagtgaggccacaaactcaaaaacaccatgcaaagctgcagcaaacgaacagcaactacaggaaacccgggacatgaattgagagttcagttgttcccattaacaatctgaatagagaaataaaaggcaaaatcctaatcgcaaagagtgtacaatacctaggtagtaagggcctaataagaattgctcttatttgtgcccatcaggaaaacatacagagaagttaagtttatcagctcaaggaatcaggtaaggatgtcctgactcttaagtctatggatcccttgattcttttagatcttgttgtccagtcacactaggtatatgctgagacacgtaagtgttttctctttgaaaaacaatttgaggttgggtgtagtggcccacgcctgtaatcccagcactttgggaggacaaggcgggcggatcatgaggttaagagatcgagaccatcctggccaacatggtaaaactccgtctctattaaaaatacaaaaattagctgggtgtggtggcacacgcctatagtcccagctactcgggaggctgaggcaggagaatcatttgaacccaggaggcggagtttgcagtgagctgagatcacaccactgcactccagcctggtgacagagcgagactccgtcaaaaagaaaagaaaacaatttgaaatccctcaagtttaccataagaaagactccctatagagatcaagctgtttcccagcccaggagatataacaagagatccttaattcaagacaggtattcccatattaggtaaagcagtcagcaacttcccaggaaaatataaagccttaagttagttgaaatgtgaaacatctgaagtttaaccctctggctcataaatagctttgcctgttttggtgagcaaagagaaataatcttcatgcatagaatcctgatctgttttggagtgccaactaatatatcttttattttagccccaacccttttttttgagacagggtttcactctgtcacccaggatgcagtgcagtggtgtgatcgcagctcactgcagcctcgacctcccccagctcaggtgatacttacacctcagcgtcccaagtagcagggcctacaggtatgcaccatcacaccctgctaatttttgtattttttttttacagagatggggggcgggtttcaccacgttgcccaggttggtctcgaactcctggcctcaagcaatccactggcctcagcctcccaaggtgctggaattacaggcgtgagccaccgcacccagccttaaatgtttttatagagactaagtctcactatgttgcccaggctggtctcaaactactgggcttaagcgatcctctcattttggcctcacaaagtgctaagattacaggcatgagccactaagcctagccttattttagtttcttggctgctgtaagggaaacagaactttgtcagagtgacatgcaaaaaaattgaaatccatctcttttctctacagaaacactaaagctaaggaaataaaacatgtagccatttaaaatgctgcaatcgtgaagtccgtcttaaaagctcctctcattttgcccccctatgggactgtgacaacttagcagcagcaggacatgtcttaagccaagacgtaaggaaggaaggactccttacaaagctggacctcacaaaaacgacccgagagactcattaactcttgatccctaaatgaactggtaggaggaccataacaacagaggcaggaacttggccaaagaactctaaccaagccagacagtaaaagggcatttgtaagggatgcccctatcactgccctctgctatggccacacaagaggaatccaggacacatgaaaaacataaaaccacctccctccaaagcttctaaatctccatcccattttcagcactggaaaaatcatacataaacaaggctttttcatactaacagagcctaatgtttattcttttttttgagacagagtttcactcttgtcgcccaggttggagtgcaatggcacgatctcggctcaccgcaacctccgcctaccggattcaagtgattctcctgcctcagcctccaagtcggtggggctacaggcatgcaccgccatgcctggctaattttttttttctatttttagtagagatggggtttctccatgttggtcaggctggtctcaaactcccgacctcaggtgatcagcctgctttagcctcccaaagtgctgggattataggcataagccaccgcgcccggccaatgtttattcttctaaggatgtctgatatggcaaaaagttaaactgatttttttgtttatttcacttattttccttttttttttttgaaatggagtctcaccatgtcgcccaggctggagtgcaatggtgtgaccttggctcactgcaacctccgcctcccgggttcaagcgactctcctgcctcagactcccgagtagctgggattacaggtgcccaccactacgcccagctattttttctatttttagtagagatggggtttcaccatgttggccaggctggtctcaaactcctgacctcgtgatccgcccacctcagcctcccaaaatgatgggattacaagtgtgagccactgcacccagccaattttccttttgatttgtgcaaaaaagtggtatataataaataactatgtttaagtctgtcgaaaacagtgctatatatgagaaacataaaagtctgataagaatgcatttttttctttttttaattgatttttttttttttgagacggagttttgctcttgttgcccaggctggagtgcaatggcatgatctcccctcaccacaacctctgcctcagcctcctgactagctgggattacagcatcaccccacctggctaatttttgtatttttagtagatggggtttcaccgtattagtcaggctggtttcgaactcctgacctcaggtaatccacccgccttggcctcccaaagtgctgggattacaggtgtgagccaccacgcccagtcttttttctttttttaattaatttttttctgtcactatttgaactacaggaataatgcatgttgtcatgtttaatttacagttacattttcttagtgacagataaaataatttgcattctgcaatcaatgacttttttttgagatggaatctcactttgtcacccaggctggagtgcaatggcccgatctcagctcactgcaacctccacctcctgagttcaagcgattctcctgcctcagcctcccgtgtaactgggattacatgtgtgtgccaccacgccccgctaatttttgtatttttagtagagacagggttctgccatgttggccatgctggtttcaaactcccgacctcagctgacccacctgcctcggcctcccaaagtgctgggattacaggtgtgagctactgcacccagcctaatgacacttaaattccatgaaataaggtagtttaccttattttgttgtactgctatcaaataccatgttttgtgtgatgtggtcacattacagcataacctattttattatatgtcttcaggttcatttactccaattttatgatagactatcctctaaggctgtgattgaagaaatgtatttgcttaagataggaggctatgaaatgaagtccaaaatagggacactctacatcagagatttacaatgagtagggtgagtttttaaaattacctatggccagcccggcacagtagctcacgcctgtaatcccagcactttgggaggccgaggtgggcggatcacgaggtcaggagatcgagaccatcgtggctaacagggtgaaaccccatctctactaaaaatacaaaaaaaaaacaacaattagccggatgtggtggtgggcacgtgtagtcccagcaactggtgaggctgaggcaggagaatggtgtgaactcaggaggcggagcttgcagtgagctgaggtcgcgccactacactccagcctgggcgacagagcgagattccgtctcaaaaaataaaaaataaataacctgtggccaaatccctatttacagtataaagaaccactgaactctttccaaatacaagtaaatctctacaattaatttaagctccgtctgcactgggaggaattttgtttcccattgtgcagctctttaatgatgtataagggttgatgatgcttagctttaaatatctaggaagaagtaggaacaacatgaaagctcaaaattaagaacagagactggactctggtgtcctggcttctctgatatcccaggggcctattacactttgtcaggcccctcagctcccagcagatcaggaacttgagatctggctgtggtaaccaccctcaagcttgataactattcattgcgtccgagtacttcttatatttcgaactcattagatagtaaaaatctcagaatcctgatttcagatctcatgaactaattctacatcaccgcctcaaattacccagcctgaagacacaacgggcttggtatgaagatataaagtatgttgcaaagagactgagggcactgtagatatcttgaacaaaagggtcagactaacccgcagctgataaggaaagggctccaaacttctagaaccttcttgtcaattctgctttaggattagaacaagtatgactacccacaactctgttccaaccccacttccaataatctggcctaactgttgccagaatctagagcgttctcgaaaaccactcactcagcagctcccttggctagtccgactggcaatctcgaaccactgcggctgcttcggagtgccaacagcgcccaagcagttgccctcttccttggtgcttaacttaagaaagaacagtgctgggaaggataaagatcacccaggaaggacaggggaagaggagtctgacgtagagaacacgagataagcccctcgctcttcctttttttctctgtcatctttgacttctgggataaccgggggcaaccaggtcaattatggagacacacaatcacttcgaacccagactagtgatcgctggggtataattacaagggaaaacggggtgaggagagcaaaggttttggagacggaaagtgcagacaggcaacaatgcacagaagttaacaagagaacgcgggggtcgggggcgatgtaaggaagtcgtcatcgacgccgcgccgcttcccccacctcgcaccagacctctgaaattgccctcggagactcggcctctcctataaggacgatcgtcctctcagctggagaacaaggccatgcctcagctcctacgccaggcggaagcgggagaggaaggccgacccccaagagcgccccttcagggggtccatccggccttgatctcagatgggggggtgtttgcggagggcggggcatcgcctcaacagctgggggctgcatcatggcaggaacgagtttccctgagccacggagctgcaggtcgcctcctctactaccctgctacccggttacctcttcgcctcttggtcgtcgagcagctccggctcggtcgccgccattaccacatcgcactccgcggcagccgccatcttaccgccgggaccagagagctgggtgggaggccggcggtgaagagcacttccggttggagcatagagcagctccgcggcgccgcgcccagaagggctccctcgggctcgtctaccagagagaggctccgcttggggccagagcggcctcccgcccccggatgtccacggtggtctccgcgccggggcgggagcccaggggctgtgccggtgcgtaggcggcgccactttacccgtgggtgggaaggcggggtgtaccggtggtagcctctctagggcttggctgctttcagtattccaagagcctcattgccatagcaacttccaatcctagagagtcttcctgaaaggctccgtggagtctgggttgcgtggggaccaggtgacccaagactctgtagggaaggagtccccactgctacctttccgaccttggagtgtgtccacagcttcttcccgggaaagtcaagagacactttgagctcagttcccccagctttcatcgttctctggaagccctgcccagtcaagccaggggaacgcagggcgtcttcaccctgcgcctttcatccactccggatctccaaacaccaactggttcatcaccctaatgacgctgacccttttacaaggctcctttcatgtcagccgcctgggagtgccatctcagcattaagcctaggaaagctgacacatggcgccccagaccctgccctggagtttataaggaagctcgcggggtgaggtccttgctcttgtgtccccagtactcccacctcttatataaactctctactcatcacgcttgccttgccgaatgcggtctggattgagaattcataggggacaagggcacagtttaactgtctttgttgttattccctcacccaaacgactatttgtggagctgaattaaattggagctttctggggttaaattggaggagtatgaggagtagctttacaatgtaaagctaagagtaaaataagaagagggcaaaggaattttaaaaggatttacctgtttgttccaggaaaacagcatgtgccaatgctcatactctgcctatcccagtgtggagggagctgaaaccacagcgaccactgagtagggagggataggacaagctcactaggttggaaaggaggggtcattcgttgagccaatcactcagccctttccaaaacgcctactctgtgctaggttgtgagggcacaagacttacagaccacctgccctgcctgccagtggctcatagtccagtctaatgctagccaacctgtctcaccatcttcccactttatgttctatctaaggcaactcatttattcccacagctttacttccatctgttgatgactctcaacttttcatatctccaacctagacctttcttcagcttccacagctgtatatccaactatctactggatatctcttgtatgtttcacaaatccccaaggcttaccatatttaaatttaactttttcattgtctacccacacctcaacaacagaaaaaacaaatgttggatgtaattattatctttcctaaattccgtatcttgttaaatggattaaaccattctcactcttggcttccaatttgttgccaagttttgttgattctcctaccaaatatttcccaaatctatctccacctttccatcccgattcaggcgctcatcattttttaaaatcttggaataggctgggtgtggtggcatgcatctgtagtcccagctatttgggaggctgaggcaggaggatcacttgagcccaggagttagaggctgcagtgagctatgatcacaccaatgtactccagcatggagaaaagagcaagaccctgtctcaaaaacggcaacaacaacaacaacaaaacaacagaaaaaaaaacttggaatacatcaatagtctcctaatcggtctctaatttcatctctgttcagtcttccctcttctgccagagtgaccttcctcagggactgatcatgtctcttcattggcaatggctttccattgccgtcaatttgatctctttggcctaccacacaaagcctttgattatctgtttctttttttaaataatttaatttgagtaccaatatttaggtcctttctaccaccaatattgaacccaagttctcatagtttcagaaaatgccatgacttgtagccgtttcctccaccctagaacaccctttcccccaggcccttcagtgtctgctgactcaacgttaaatgcccttttgctgtgctccacagcacctcagtagttgttagacatctagcttctctagaccgtgagttctgatgggcagccaccatgtctaactcgtccactttctctcagtatatggccctgcaccaggcacagacagatgatgctcagaaaacatttgacgaataaatgattgagtaaacgaagagttactgtactctgatcgcctttacagagagaacatctgggcctcagagacaccagaacacccagcggcccgcgtccagggagtctagaaccttgggctcccgcgcacacccaggccaggtcctggccgtcattctcccgccggcctctgggggagctgcgcggtccgcgctctctctccgctgccggaattcgtcttgcctgacggaagctggggagcgggcaggcggcgggggcggggcctggaggagcctacaccgactctggaggaagactggagcctttgcggcggcgctgcccctcccctggtccccgcgagctcggagggcccggctggtgctgcgggggccccgggaggtacggacctgggaggcgaggctcgtccggcgctaggatcggcctccgcctccgggccgctttaggtggctggtctctgcctctcattccctctgggggctcccccgtgagaaaatctgtggcggaggcacctctggcccactcttatggtgtcctttattgtggggctcgctatatggagagggggtctgtgtcaggagcttcccctggagaggtttctgttagggaccgtctttgggagtgatctatctctgctctctgggggggatctttgtctggagcttttggggggcttgtgtttggaagtttgccttcggggagatatctgtctgggacctcttagggtttctgtatctgagctttctcttttgtgtctgtcagtccaagggcagcaaaaagtatgtcctttctgaagcctttttttccgtaggtttcttcattcttttctctcttgtcttatgttcattttagccatagacttgactggagtttagagggaattgattgttgtccagatgagtcgtacaggaaagcagattgtctttttttgagacggagtcttgctctgccgcccaggctggagtgcagtggcatattcttggctcactgcaatctccgcctcctggattcaagcgattctcctgcctcagcctctcaagtagctgggattacaggcacccgccaccacgcctgactaattttttgtatgtttagtagagatgaggtttcactatgttggccagtctggtctcgaactcctgactttgtgatctgcccacctcggcctcccgaagtgctgagattacaggcgtgagccaccgtgccctgccccagattatcctttttatttgctcagtccccccagggagcagatggcttcagacagccacacaaaacactgttcctgcttaattctccatggggtcatggttaaagagaggaagctgggctgagctccctttactaattggtcctctacatcttgcgcacagaagggaacctggcccagtggccagtgactctcctctccctttatggcagcatttccaagcacctgccctgtgacagatactggctaggtactggggataacaaagacgaataaaataacagcttaccatccagtagtagacatggagacatccgtttcctctgactagcattgggatggtgctgaaaccctggaactatacattcagtttagaactatacattcagtttagaactctcagttatggacgttctgccttctgtttttttggtttttgtttttgtccaccagaaaacatctgctagtaactgccttctgtgttgatgctttctttcctcaccttacccagcgtgcttctgttcttcaaggttgaaaactaagcatggggaagagctgcaaggtggtcgtgtgtggccaggcgtctgtgggcaaaacttcaatcctggagcagcttctgtatgggaaccatgtagtgggtgagtgttgttggagggggaggaacagtggaagaagttgaaaaataaggaataggacttgatcacaacacacacaggctaaaagctgctcctggtggttttcccccctggaagaataaaacttacattgtaacagatcaactctacaacactgaacaaatacggagggagaaagccctatgtccaagataggaaagagaagctgtcatgtcacacttgtgcttagcatggaattagcataaaattaatgtccattggccgggtgcggtggatcacgcctgtaatccgagcactttgggaggctgaggcgggtggatcacctcaggtcgggagttcgagaccagcctaacgaacttggagaaaccctgtctctactaaaaatacaaaattagccgggtgtggtggcacatgcctgtaatcccagctattcgggaggccgaggcaggagaatcgcttgaactcgggaggtggaggttgcggtgagccgagattgcgccattgcactccagcctgggcaacgagagcaaaactccgtctcaaaaaaagaaagaaattaatgttcgttcccctaaacccaaatcatttcagtcctgccaggctgtcaattctctggcctcctcagccccctacattcctttctccccatttggtcagccttaagatgctctcatcactcacatttcccatctctctctccacttcagacagttttctcattttataccaggttcggagatgatcgagacgcaggaggacatctacgtgggctccattgagacagaccggggggtgcgagagcaggtgcgtttctatgacacccgggggctccgagatggggccgaactgccccgacactgcttctcttgcactgatggctacgtcctggtctatagcacagatagcagagagtcttttcagcgtgtggagctgctcaagaaggagattgacaaatccaaggacaagaaggaggtgtgtggcataggcttctggtgggagcctcagtggtcagagagtttgggcggagggctggtttgggaagcctggcatggctccattcttcactccaaggtgagttaggagccagaggtggggtggaggccactgagggtatctttaccctcaggattggctgcatgttgagtctgctcaacaaaagaggcctctttgtggtttaaggggtccctgacctaatgtatgaagcccccatttagttgttgaaggggtcactgacctaatgtatgaagcccccacttagttgtatgaagtccccacatagttgtccttcctgatggttctgtgcttttagctatgaaagcccttcttttgtttgtttgtttgtttgtttgtttgagacagggtctcactctgccacccaggctggagtgcagtggcatgatcacagctcactgcagcctcaacctcccaaggcttaggtggtcctcctgcctcagccccctgctaagactacaggtgcatgccaccacacctggctaagttttgtatttttagtagagatggggttttgtcatgttgctcaggctggtctcaaactcctggactcaagcagtccacctgcctcagcctcccaaagtgttgggattacaggcgtaagccactgcatctggccacgaaggcccttctgttctccagaatcccacagtaagctgcagggttctgggagtgcttcctcacctgttgttgagccagaaactgactgctaataatgagcatgtatgggcaatacagagctggtgatagaactcctaaaaggagggctagatggaggccagaatttgaacagaggaaagagaaaaaaagcaaccatctccttccccacaatgagtggtatggaatctagaaagagatgagatatcagccattgagctttcctctcatagaactcctaggtggttgccagcccccatgtccattcctggttctatggtacattcacaggcctatgctctgtccctcttccccaggtcaccatcgtggtccttggcaacaagtgtgacttacaggagcagcggcgtgtagacccagatgtggctcagcactgggccaagtcagagaaggtgaagctgtgggaggtgtcagtggcggaccggcgctccctcctggagccctttgtctacttggccagcaagatgacgcaaccccagagcaagtctgccttccccctcagccggaagaacaagggcagcggctccttggatggctgaagagctgccgttcctctttcacgatcccagccccatttcagtgtctggggctctggtagatgtgttgagggcaaagtagaggacaagctgtctttcccagtcagccagggagctccccgccaggccacgccccagccactttgctccctctcacctctgggaagtgcaaatactcttggttgacatccccttcctcagccctcccagcctactccccatcccagcttttagaggatctgctccactgtctcctggggcagttgtgggtcactgtcccttccagctgccccagacaggaagcagagtcaccacgcagcagtgtcccttcttgggtctgagttcctattataggtaggggccccaccctctgggcttcccatcagcgacacacacacacttatggcaccagcctggactccagaaaaagggtgtccaggtattgtgtgtatgcatttagttgtgcacacacaaatatgctcctatactggcattaggcgtctcctcatccctcaccctgacctttctcctgtccttttcttggctggaagaagttggcctcctgggagtgtagttttctgttttaaatcccccacccctggctgggctcagtggctcacccctgtaatcccagcactttgggaggccaaggcgggtcgattacttgaggtcaggagttcacgaccagcctggccaacattgtgaaaccccatctctgccaaaaatacaaaagttagccgggcgtagtggcacatgcctgtaatcccagctacccggggaggctgaggcaggagaattgcttgaactcagaaggcggaggctgcagtgagccgagatcgtgccactgcactccagcctggtcaacagagcaagactccatctcgaagaaaaaaaaaaaaaattccccacccctaccaattgttttacttcctcttcctgctcagggagcagatgggcctcactggttgagatggaatagaataactgggctatgagtcaccagcccactttgtgacccagcaagacctttcccctctctgggcatcagtttctcatctgtaagatgaccagagttgcttagatgatctcctagatcctttccagttctcttgatttcgtaaagccaatggcttctccctctttaaggtgctatgccaaccagccctggaggctgggatctgccgctccctccagccaccagggggcaggagtgcactacctgctgtcagtcaccagagtggccgctcagtgcccagcccgccagcctcgctcttggaggctgctctttatcctgcctgtggttttcagctcagagctggacttctatttataagttacctgtatttatatttatatgcccgctctcatggtgaaggctggacaaggtgctcctctggcccctccttcttacctcagatgcctgaacagaacaaggcaaacccgtagcagcctctcaggagctgacaggtcctctttcggggctcaggagggtgggcacacacccagcggcctgcagagtaagcttattacccacaactgtgcccgctttgtgcttctaaggtgcacacctagcctaggtgagacactgcagccaggcaaccaccgacacacgccccttctcaaagccagaggtgagtggggcaggtgcccggggctgggtgagtggaattaggacacacacaggcttgggcttcaagttcatttattgatgcattggttggacacaataaaaccacaattgttatcaaaaagtttccctcccctccccctttttctggttctcccattggaaatgtctttaaaaaacaaaaaaaagatacagggggatactggcagggtcccatattgtggggtggggagggggcagtgctgcagtggaaaggagtttgtgacattgacattgacagcatgaaaatgggtcttgccagtgcatgtgagactgcctcccaacactcagcttcacagtggcaggggctggttgggagaagggaaagctgaatttagtgctaggaccagtttggagtgggaagctgtaggggaaagctcttcctttgggagctctgcggggggttcggtgttagctgagtccatagtctgagggagacccacacccgccctccaagagttggggttcaggaagtcagagaaaggctaagaagaagagcttctgagggatgagttactccctcaatattaagactgggcttatcagcaagtatcacttgaaccagggaggcagaggctgcatgcagtgagccaagattgcaccactgcactctaacctgggcaacagaatgatactctcagacagaaaaaaagactgggcccatgaatgcccagaagacttaagattaaaacaaaaccctgggcccaaccagaacatcacctcctctcttagtcccaccccttcagagcagatgaagcccccaaaagctttcagaaccagccccactacctccttggctctgccccaccttagcactgctgatcgaaggacttttgggtccccctttctcctccatggtcctctgtcacactcccatggtcaccttgtcctgacagccttgagcctgctgcagctagagaccccatccctatctccagtgaagccccaaagcctaggaatagaggtcagagagtcgtcccctggctaggagaggatggcttgtagaagctaagattcctagagtctggccatgtgggtcttgggtggaggaaagtgagagcaccacatggctggggctgagattttgcatagatctttggggtctgtcagggtgggaaatgcaggcaagcctaggattaaccctggaaggcctgcgaaaggagggtggggacagtccttggaaggcagctgcccttaaaactagcccagctctttctggatcgggcaggacccctgaagctgttcacagtccctgtggcatgtaggaaaccaaggtgtctcaggacaggaggagacaaggagtggctattgggaaatcagctctggcctccccatgagggctaataaggggcaaggacgataggtcctgtggcagggcggacagctcctgctggggtgcgaaacagagctgggcccaggatgggagccgggaagagggtagtggctgctgtaggggcagggcggagggccaggggccctggcagagcacagatggcagtggctgcggtggggagcgggctgggcaggaagcgggctgccaacgtcttggtgagttgcttctgcaaggccagtttagactacacggaaaagaaaggaatggacacagtctccaccccagaaaaccccaccccctccctggggcccatcctcaagctttttgctgcagggaaagcgtgccttttagagttccaaacctaaatcctcctcccttcccacccccaaacattcattccgaagggctttctccaccacctgtcttcctgtccagagggaggaaagtctcagcatgggagaagggaggaggatttacgggatagagatggtctctaggagatgcacgcccacccctcactcttgcccctaagatgactatcccaacccacctccccggaaattcctctgcgcagatcccagttcccaggcctagctctgtcactgcccagcagcctcattgcagggtggcctcttttcctgccccaccgcagcccccccatctggccctcccagcccaccctctcccctcctgacccagtcccagctctgttgcctggagacagataccttgaggatactcacagccagcgctgcgtgcttctgcagcttgctgtgctggctggagggcttgggggtcttcccggccaggcggtctttgtgcctcctgctgctcatgtgctaatggacagacagacagactgggaacaagatgacaaagcccaaggaccccaagaccatcatcctcgactcttccccttcctctatccacagctcatacatccaaagcacacagactgggtcctcaccctggggtaggccctgggaaggggaggtgagtcttggcctttgcccttaattggcccactggcctgctggcctcgcttctccagcctgctctgctgtgccctgcctgctctcttcagggtccctccctctgctgccctgccccccaaccccctcccctggctccaaccccagtcacagcctcacttctcccacctgcttcagttgggtctctgaattgacctggagctgacagagagcacagtggaaggcagggctgggcccctgccggccgccccggccccctgtgactctcttggctttgtgtccggcacctcccctggacaccgggcggccccggctcctccggggagcccctcgctgaccttccatcatccaccggtgcttggctcctggagagggaagaaggcagtctctcagcagcaggaaggggttgcaggggccacagagaccccctccacactcatgcaatttggctctccctgtaagcctcacggctgctctgtgcacacatcgccctccagccacacgtggtttcccctcccagcttctgtcctttcatgccagcccctcctatgaaaggcctttctgcactacaaatagctgccttcccctttgctttgatctcagtcctttccttctgggtgtaatctaaggagagaggcagatgtctcctgtctcctgtggagtgacccttcagagatttagcgaccttcagttcttgctgcctcagacttctcttcccaattctccttccccaaggagtaatgggaggacccagaaacgtccgttcagtaacacacaagcacaaagcctccgccatccaacccttgagcgaagcacccaggaactcaagcctgccctcatctggcgaggcttagcttctgtcccaccctttccctgggctccagctcctgggactactgacctgtgttgtgagcctgaagctgggaggccgagttcactgtcaccttacacgtggggcagtagaggtgccccttctcactcctgccttccccactcatgctgcttcccacggcagctgccgctggctcaggccccggtgcctctctcccaggctctggggagcaaggtgggcaggaggaagaagaggatgaggaggcagcatccaagagctctgagtgggctggctccctgcatgtagggtctggagttggtggtggctggagtggaggcccaagaggaggggctgcaggaactgctgcagagatggaagagtgtgagacccaagatgacgctgcagaccacgatcttcagctctgaccatggaggtggcctggagggcccctggtggatgaccagcactgaattccaggccccacttttctaccaactcactgggcagacttgggcctcagtttccccatctgaaatcattaagttggacacagtggtctcagaaagccctcacagccctcatatccttatttgctaacttaaacagagatcaccaaaaaagatgtactagaatgttcagagaacactattcataatatcataaaactgaaactacccacatgtccaccaacaggagagcagatttttaaaaaacaatggtgcgggctggatacggtggctcatgtctgtaatccgagcactttgggaggccgaggcaggtggatcacctaaggtcaggagttcgagactggcctggccaacatggtgaaaccctatctctactaaaaatacagaattaggcgtggtggcacatgcctataatcccagctactcgggaggctgaggcaggagaatcgcttgaacctgcaaggtggaggttacagtgaactgagatcacaccactgcactccagcctgggcgacagagtgaaacgccatctcaaaaacaaacaaacaaacaaaaaaaacacagtggtatgggccagacgcagtggctcacgcctgtgatcccaacactttgggaggccaaggttagcagatcacttgagtccaggacttcgagaccagactgggtgacacagcgaaacaccatctgtactaaaaatacaaaaattagccaggcatggtggcacatgcctatagttccaactacttgggaggctgaggcaggagaatcgcttgagagccagggaggtggatgagcctaggtcacaccactgcactccagcctgggtgacagagccagaccctgtctcaaaaaaaaaaagagcttttaagaatttaaattaaaaaaaaatagtggtatgatccacggtggagtactacacagcaatgaaagagaacaaactacagctacacgcaaaaacatggatgaatcttacagatataatgaatgttgatgaatgtttgtgagagatgaataaaaactagataccggccaggcagggtggctcacgcctgtaatcccagcactttgggaggccgaggtgggtggatcacaaggtcaggagttcgagaccagcctggccaatatggtgaaaccccgtttctactaaaaatacaaaaattagctggacgtggtggcaggtacctgtagtcccagctacttggaaggctgaggtaggagaatggcttgaacccaggaagcagaggttgcagtgagccaagattgcaccgctgtgctccagcctgggagacagagcgagactctgtctcaaaaaacaaacaaacaaaacaaaaaaaacccacaaaacaaaacagatacaaaaaaacccctgcacactctatgtttcaccaaaaataggtaaagctgatctatgctgagaaaagtcaggatcgtatttaccatcagaggggttgtagttagttgaatagtgtctcccccaaaattcacatctatctggaacctcagaatgtgaccttatttggaaacagggtctttgaagataaaattagttaagatgaggtcatgctgggttcgggtgggattgatctagtgactggtacccttataaaaagagcttgtggaaacacagggacacacaagggagaatgtggagatggaggtggagattggagtgatgcgtctataagccaaggagtgccaaggaatactggcagccaccaaaggccagaagagaagcatgggacactttctcctctaagcccccaagaaggaaccaatgctgtcaacgccttgatttcagacttctggcctccagagctgtgtgaaaataaatttttgttgttttcagtcacccaggttgtagtctctttttttgggggtgggggtgggcaggggaggttagagacaaggttttgctctgtcacccatagctcactgcagcctcgacctcctgggcttaagcagatcctcctgcttcagcctcctgagtagctgggactacaggtgtgcatcatcatgcctggcaaataaattttttgtagagacagggtcacaccatgtttcccagactggtctcaaactccaggcttaaagcaatcctcccgcctcagcctcccaaagtgttaaccatcacaacatgtgagccaccattcctaacttcacaaatgaagtcatttgtgaaggcagcccttggaaatgaatacttcaaggtaatgaccaggaggaggtgcaagacaagcttctgaggtgctggtaacgtgtttcctgatctgggtgtgttcagcttaggaaaattcatggcgtggtacacttgtgtgcctttgcctgtctgtatggaatactccaacacaagcaaaaagaataagcagaaatctctcaaccccttgtcggaaaccagatttggagtggagacgtgggaaagagaagagctcaggactgacctttactctgtggctctccaggggctccactggccagcgttgggattggggacactacagccccatcctgggcctgggtgtgtggcctctgcttgctcttggcagcctcgacagccttgagttttctggcgtgtttgtggcctttataatgtgcctcggcctggttctggggaggggagggcaagaggtcaccattcactggctgagtccacatgccccatctgtgaactggagcccagcagggggacaggtcaaagggaggcagggctcaggtcacacaaagggcaagtccttgtccttgtcatcatcatcaccatagcacatgtggctctgaggtttgcagaatgtgttctcgcacatgaactccaaggcaggctgcctctggcttcagatctgacccagccacttactaaccacatctttttgttgttgttgttgttgtttttgttttttgttttttgagatggagtctcgctctgtcgcccaggctggagtgcagtggcgccatctcagctcactgcaacctccgcctcccgggttcaagcgattcttctgcctcagcctccggggtagctgggactacaggcgcccgccaccacacccggctaattttttgtatttttagtagagacggggtttcaccatattagccaggatggtctcgatctcctgcctcgtgatccacccgcctcagcctcccaaagtgctgggattacaggcgtgagccaccacgcctggccactaactacatctttaggcaagtaacatctctctgagcctgagtctcctcacccataaaccctgtgatgataatactgacctcatggggttgtcagaattacatgggaacatgaattacaagggccgagtacatagagtaggtgctcaatgaatgttagttatcaagtgtatcaatgcacaaatggagaaagcagagcaatccccacactttggggtgtatgtaccccagaacattcatccctttgttcatttgttcaacaagtcattactgagcatttgctatttgccaggcactgtgcccggggtccggcaggaagaagaatggttcctccctcagaacgaattctctcctccatctttttttttttttgagacggaatctcgctttgtcacccaggctggagtgcaacgggagcaatctaggctcactgtaacctctgcctcctgggttcaagcgattctcctgcctcagcctcccgagtagctgggattacaggcacctgtcaccacaactggctgcttttttttttttcttctgtattttagtagagatggggtttcaccatgttggccaggctggtctctaactcctgacctcaagtgatccacccaccttggcctcccaaagtgctgggattacaggcatgagccaccacgcccagcctctcctccatctcttgcaggactcatggaaccagaaggcctgaagggaatcctcaaatctggtctgtcagtgtcctccctccaagggtcctcacttgctgctccccggcccacctccttgaaacatgggaaagacaggcccccatggcccctccctggatgctataccacagcagttctgctggcatccaaccgaaaccccagattgcctaacaggaggtagaccttccctgggaggccagaatgaggttcctcctctacctagtggtaagatgtagtagaaaggggtaggctgtagtagaaagtcatagaccttggggtcagccaggcctggattcatatcccagctttgctacttaccagctgtgtggtcttaggcaagtcacttaacctctctaaggctcactttcctcatctgaaaatcggggattataatagcgcctctaggccaggcgcggtggctcacacctgtaatcccagcatgttgggaggttgaggtgggtggatcacttgagcccaggagttcgagaccagcttgggcaacatggtgaaaccctgtatctgccaaaaatataaaaaaattagccaggcgtggtagcacatgcctgtaatcccagctactagggaagctgaggcacaagaatcacttgaaccctggaggtggaggctgcagtgagccaagattgcgccactgcactcccgcctgggtgacagagtgagaccttgtctaaaaaaacaaaacaaaacaaaaaaatcccgcctccacccgtctcacagatgtatcatgaaaactattatttaaggggatgggcatgatcacattctgtaaactctcaggtgccttaagagctcagctccagaccaggagctgatgagatgggccactgggacctggagtggaggaagggcagtcttctctcttgcagaaggatccagaacacaggagagaggcctggggggaaggaaatggaatcccactgggctacagctgggcagaaggggaaggggcagaagaatctagagagaggagaggatgcgatggttaaaggaccaagagtgcctcttctgcagccagggtggaaaataccgaccacagcccctttgccactgatattcctcccagaaggactctgaaagcccagcctccagccctctccctgcccagccccctccccagacctgctttcactactttgtctcaccgctgagttgaacctcaggtgacagatgttacaggaaatgaacagcttcttcttcagaggggaggggacaccaaacgtgtggctgatgacagctttctggaccgggtccatctgtgaagggagtgggagggcataataactctggggttggcttgggaagcaggggtcgggggcagcacaaaatgcccaaaactaaagatgactgaagagggccttggtcagcttctaggaagaacttttccatcctgtggatgttggaaagagaaacagctgggccaggcgcggtggctcacacctgtaatcccagcactttgggaggccgaggcaggcagatcacctcaggttgggagttcaagaccagcctgaccaacatggagaaaccccatctctactaaaaaaaaaatacaaaattagccaggtgtgatggcgcatgcctgtaatctcagctactcgggaggctgaggcaggagaattgcttgaaccagggagatggaggttgcggtgaaccgagagcaggccattacactccagcctgggcaacaagagcgaaacttcgtctcaaaaaaaaaaaaaagaaaagaaaaagaaaaagaaaaggaaagaaagaagaagaaacagctgcctgggtgcagtggctcacgcctgtaatcccatcactttgggaggccaagatgggtgaatcacctgaggtcaggagttcaagaccagcctggccaagagaaactccttctctactaaaaatacaaaaattagccaggtgtggtggcacgtgcctgtagtctcagctactcaggaggctgaggcaggaggcttgaacctcagaggcagaggttgcagtgagctgagattgcgccactgcactccagcctgggcaacagagtgagactctgtctcaaaaaaaaaaaaaaaaaaaaagagaagagaaaagaaaagaaaggaaaagaaaagaaaagaaaaatacacagcctctcccggctgtctttatttgtcagcctaggcttctgcttggaagcaggggaatggccagagtgccctgcatgtttctgggacatagaaccatgtcctggtgatcaccttggcatctcttggtgccccttaggtcattatttttgttttttgtttttctcctttgcaataattacaactattgggacagagagttggaaacaaggagaggcagggaagagacaaagaactcgtctgttggaatttcctctcccatcacccaggcttcatgcagggacctgtgggctgggggaagataagtcctatctcatcagctctatcactgtcacagggcctgaggctgctgacgacctttttttttttttttttttttttttataagatggaatactgctctgtcgcccaggctggagtgcagtggcatgatctcagctcactgcaacttccacctctcaggttcaagtgattctgctgcctcagcctcccgagtagctgggattacaggcgcccaccactacgtctggctaatttttgttatttttagtagagacagggtttcaccatgttggccaggctggtctcgaactcctgccctcaaaatgatccgcctgccttggcctcccaatgtgctggaattacaggtgtgagccaccgtgcccagccatgacgacctctcttgagagagtgagagccacagccaggggaggtggggggccagtagggggcagggagcagcaagtggaggcctaaggttccccaaggagtaggatcgtttctttggaatattaatttggattttttttcttttccttattatttttttgagatggagtctccctcttgtcgcccaggctggagtgcaatggcggagccaaaatcttgcaacctccgcttcctgggctcaagcgattctcctgcctcagcctcccaagtagctgggactacaggtgcccactaccatgctcggctaatttttgtatttttagtagagatggggtttcaccatctctgttggccaggctagtctcaaactcctgacctcagatgatcagcccacctcagcctcccaaagtgctgggatgacaggcatgagccactgcacctagcttcttttccttattttaaatcatttttttcttctatagaattaaggctttatgttcccttttctcaggaagttgggccaaatgcagctgtctgaacttgtcaagaactttccaggctgggcgtggtggctcacacctgtaatcccagcactttgggaggccgaggtgggaggatcccttgagctccagagtttgagaccagcctgggtaatatagtgagacctcatctctgcttatataaaaataaaataaaataaaaaaggaactttccaaaccttcccaagaaaagaaaacagagcttagagagaagaacatgggtgcagaaacttccctgagaacagaaagtggttcaaattttcacagcacccagggccagcaaggggctcaggggacaggacctcagaggagaatggcctgcaggggccccctgcaattggaaccatgccattcaacagtgagcctgtcagcaagcgacagcaaggactcaagaccagaggaccaccccccaaatgcctcagactccttaggacctctgtctaactctggagggtgggagggaagggattcctaagtgtgactgaggtggagtttgccaccatctgctcaggatggggcatgccacacccatgatttcacttgagttttcaaaatttaaaaaaacagagatggttgctgatccctcatatagtgaattaaaattcatatacttgttatgcacacgtgtacaaggaaatgtacagactaggacacacacacagcacagaagcttcaggcagttacaaatgctcagacaagcagaacaattcacactcatgcacacaaagggcacatgaccacaggtaaactcacaatcacccaagccacacaaaaacacgcatgctcagagggcagatacacgccaaacacacaaaagacacaaggacacaataaaccctcagattgtgcaggcacataccttaattacataaaattacccatgcacaaagagttgtttacaaacacacgttggacaccaacacacaaactcacatccacatataacatacaaaacctatagaaactacaacaaaaaggcacaggttacacacacacacacacacacacacacacacacacacacacacgtcatccacaggagcgcctacacagaagcttaagtggaatgcacagactacaggcccttgcaggcccagcagctatgatggtgggggtggggaaagggctgacaccatcttgttccccagcctaagagagagcgggtccctctcttaggatcccaaataggggtccctatttggggagcacctatcccctctgggggatgttggagaaaaagctcctggttagacccagctgctgagagctggaccctctgaacccaccttctgtgcccacccacaagcttgtgtgcatgcccccacccgccagcccagcccataccgtgctgaagttggggaagagactgagcggggcagcgccattgaagtggaaggcgagcaagtgcttgaagtccagcgggggctgcagaggccgggtgggcaggggcagggaggccagcagggggctgggggcgccggaggccgggcctgctgcaggaggaagaagggcagggtctgaaatgggctctgtcctacccccgtggccagaacaagaggcgggtgggcttcttgggtgtggagctgggcagaaacctgtgtctctcttcacagagtggcaccagccagacccatagtgattatagcccccttctctgtgcccttcctccccacagctggggaagcagaggcagggagtccacagttgaggctcccagcccagagggatgaccctcctgcccctactgaggcagcatactgaaccccagggcagcccagccaagagagggacagaggggtctgggcaggccctgacacacacaccaccatggagactgcatgatgtgctgggattccattttattgcaaattaaactcaaacccaggggtattaggaaaaggctagccctcgcccctctcactctctaactatcctccctccctccagatccccaggatttcatggccagggctgacaggagggaatgggaaacccatgggctctgaagggatgtgctccccagctctgatgaggcctaaactgcttcccccaggaggtaaataagccaacattcctgggttgggcctcgacgccagtccttggaggtggcaggtacagcactgtggttttgcagtctttggtcttaaaggtctgaggcaagggcaggggaggggtaggaacttggagagcaactggactttgaggaagaaaatatcagaaaaaaaaaaaaatccagcccatctggggcttttttcgaccctgtcattgcaaaaccaaaagtagtccttttagatgtttgtgtggtaacactatgaaagatagcatagatttatttcacatttgtaggtttttatgtctatatacacagttatacacagaaaaggcctgaggctgcctattggtgaggagggaaggaagggaaccactatctctctggaaccattggcccttgaaccaccagcttgtgtacagagaggacactgtgctgtgtgtcagaaacaagcacggtcatctactccccagtcatagctgaagagaagagacactgccaggagtggggctaagaaacagccaaggaccagacgcagtggctcatgcctgtaatcccagcattttgggaggccgaggcaggtggatcacttgaggtcaggagttcgagaccagcctggccaacatggtgaaaccctgtctctactaaaaatacataagttagccaggcatggtggcaggcgcctgtaatcccagctactcaggaggctgaggcaggagaattgcttgaacccaggaggcagaggttgcagtgagccaagatcacaccactgcactccagcctgggcgacagagcaagactccatctcaaaaaaagaaaaaaaaagaaaagaaaaagaaagaaacagccaaggaccaaggaccagtgtccgttccctcagccactcaatttccaagacctagtcttccttccccaagccaaaaactcccatctttggggggacccaaacttgccccgagtccagaagggaaaagggtgagctactcctcatctaactgtgtaaaggccaggaatgatttagggtaccccagatcctagcatctctgcccacccgcccaggcccctcttgagccagtcccttcctccacagcccacagggtggggggggttggtgggaagctccagaagggcgggtggatggcctcaggcccctgggaggctgcagtcagcagatcatcttgggtgcagcatggtcaagtctaggttggcccttacagtgcccagggccccaggctggatgggccgagggaaggaggccaccctcaggtgagctgcgaccccaggaagccctctccccacccactctctaagaactccacagccaacccgaagtcaaactcgtgcagcgggggcccatccactgcgatcttcaccatgtggcccccccggccttccccggccccactctgcccccaccaccgcagctcccggctgcggccgaccttgtccagcaggccagcgcccgcgggcagcgccaaagccaaggcggctagggcggcgaagtcggggaagagctcgtgcagctccgagtgcgcgcacgccagctgggtgcacagggcccgcgggccgagccgcccaaggccgaatactacgcgcttaaacagcgcgaagtcgcccagcgcccgctggcgcaccacggcaggagcaaagccgcgcagcagcacccgcagcgccccctcgccatgcgtgcccagctcctccggcgcctgcgggtagcgtcgggggtcgaagatcgctgcgaaggcggccacggcgtccagcgaaggcccggggtaggagtcctgtaggcccttccgcatggagtccaggaaggatccccggagccactccaagccccggaccgcagcctcggagtaaccgagcagctccacgccgcggtaggtgcagcgtccgctgctggcgtcagggtccatggatgccagttcctgcaggaagccctggaggcgggccccacctgagccgcgctgagcttggagggaggccgcagccgccatcaccagaggctgcagcaaggccaagtccggctcttctgcctgcaggacaagggagagcttctgcacagagggcagggcatccagcagcaggtgggtgaaggccacgaaggtgaactggcgcagggccagggccagtgaccccgccacaggtgaggcaagggctgcagcctccagggtgggcaccaggccaggccaggcctcggccactgcttccactacaggcagcagggaggcccagggcactggccgaggccctgccaagtcaatagctgcaaggtccagtgctgcccggagctcagggaccaagtgggaactagggccaccatggaggcggaatagggcatccaatatgctctcatattgacccaagtaggccgggggctcaggatctgtccggccagggagacaatgcagctctgccagcagtgggcaagtggcccggagctgtgggcccacactccccaggcgctcactggggaggcttgagctgagccaggccagcttgggtgcagatacgccgaaagcctgcaggatgtccaagagctggccagcagtggcctcgccctcctgtagctccacactgcccaggaaggtggtggcgggctggccatcacagggggacactgaagtggcaaacagggccaggctgtgtgactccggccagtctctggtctcgtccaacaccagccccacatatggggatgccttcaggcgctggcaggcctctgtgtgcaagacactggcaatggccacctgggacagccagggaaagaaagggagggaggactgagttaggcttgtcctgagaggcggaggcaggcagtgcggggtggtggaaagagcccaggccttgaggttagacagacttagggactaatcctggctttgccacttactggctgtgctaccttcggccagtcacttcacctctccgagcctcagttttctcatctctacagctcctggcctgtctaagaatatcctcccaccccggcctcccaccacacccggtctagttttctcagctcttatacctgctgtcagctaataccagcccgaaatcttctcaaagcttgttgtgaattataaacatcaacttttgttgtggtaaaagcactttatgaatcataaagagctctaggaaagctagttttttcactgtgtttttctatagcatcatcctagtctgccctattcctgggggtctccctccactgtccagctcagtgattaactgataggcacactcactcccaactcccaaccagtcaccctgggtcccagctgtgtgctgtttctctatttgtcatctctgtaggatgagatccaactcccccacctccaacccagcccataggacttacacagttagtacctaggacagagctgcaatttgcatgcttccaggggccatgtgagtgatattgagcttggagagggccagggataagccagagggaacaccctgctctccaactccagcacatcctgctctgagagcatggggaccttgcttttcaacacaagtcacaaatctagatttttatatgtaatctcctgagttttttaaaagttgaaacacattcgagtttttcaaaaacattatgaaaaccaattaaacaggctcagcacagaaaacagccccaaaagaaaactaagtcaaaagtcatttccatttccattccagcactttgcggggccaaggcaggaggattgcttgaggccaggagcccaagaccagcctgggcaacataatgagaccccatctctatgtttaaaaaaaaccaaaaaacaaaaaacagaggccaggcgcggttgcttacacctataataccagcactttggaaggctgaggtaggcagatcacctgaggtcaggagttcgaaactggcctggccaacatggtgataccccgtctctactaaaaatacaaaaattagctgagcgtggtggcacatgcctatattcctagctaatagggaggctgaggcaggagaatcacttgagccaggaaggcagaggttgcagtgagctgagatcacgccactgctctccagcctgggtgacagagtgagattcctcaagaaaaaaaaaaaaaattaaatacatctgtgggtcaatcaagcctccaggccaccagtttgcaacgtctgatttaggcagtgagaagagtgcccctgtgcccgctaagaggcctggtctggcctcttcactgttgtatccctgcagctggcccaggaccagggacataggctctcagggaaggttctgaagggtgaagatatgaatgaaatgccctagctgctccccaaggagctggcatgctggggctgttcccaggtggctcagtgtcctcccttcccaagcccttcccccatacttctggctgtcacccacctgcatgtccctcaccctcctgggactgtagtaatcgccatgctctgtgcccagcagtgcctggcacaggttgaacctctgcagctcgagcagggcagagcagcggtcattgggcacatcctcctttgccatgcagtacacagtagtcagcacagccactttggccgggtctaactccaccttgacgcccctggaggcaggggtcgtagccaggcctgggcaggcccctccaccttcagcctggccctcaaaagggggctggccctggttgacagccagagcctggcggtgggctcctgaggtcacgtggcgcagcagggcgtggcgctggaagttgtctgtgcccacagtgaaggcgttttcggctttgccatgcttgttccgtaccagggcctggcggcactcgaggcagaacatcagcttccgctcatagtcaaagtccagccaggtaaactcctctttccagtgctcgttgaagtaacgcttacacttcttgttggagttggaggcctctcccgctggtttcttccctgggggcaccattcttgctctctcagcaaggaacccccaacccccacctgaatgctcttgcccccctgcctcccccacacacaggcacctcccttgacaaggagagttgatggggaggcaggctgggggcagcccgccaggctaacagggcccatccatctaagcctggagagtttattcctgctctgccggtgggagactggagatgaaagagacaggcagaggtgttaggggtctgtcatggtaggggtggtttagggtggagtggtaggcttcatgctgcccacagagtcctcccagctgaggggtggagggactcactggggcaggggctctgggcagtgggtggagtcatgcaaagggccctagagcattatccaaagcaggggaggtatggggaccccagccccctcccagggtctctttccacccaggacaaggcactaattcgctttgactgatgaagcatctcagaactggaaaggctggcatcacctaggcaactgtattttataaaggggaaactgagtctggagacaggtagtggttctcagggcccatgaggagttcatagtgaaccaggactaaaactcagaactctcaactcctagcccaaaagatgactgtgcccttcagcccacagtcatctatttcatcagaaggaaatcaggccaggcatggtggctcactcctataatcccagcactttgggaggtggctcacttaagcccaggagttcaagaccagcctgggcaacatggcaaaaccccatctctaaaaaaaaaaaaaaaaaaaaaaattagccaggcatggtggtgcatgtctagtcccagctactggggaggttgaggcaggattgcttgagcctgggaggcaaaggttgcagtgagccatgatggcgccactgcattccagactgggtaatagagctagaccctgtctcaaaaaaaaaaaaaaaaaaaaaaaagacggccgggtggggtggctcatgcctgtaatcccagcactttgggaggccgaggcaggcaggtcacctgaggtcaggagtccgagaccagcctgaccaacatggagaaaccccatctctactaaaggtaacaaaattagttggcatggtggcacatgcctgtaatcccagctactcgggaggctgaggcaggagaatcgcttgaacccgggaggcggaggttgcagtgagccgagatcacgctattgcactccaacctgggcaacaagagcaaaactctgtctcaaaaaaaaaaaaaagaaagaaaagaaatcagcagaaagctgattctttccaagacacaggaagatttgctttctctaaagctccattccttatacacacaggtgaacacacactcacactcatacccattggtactgtggttctgggatgggtagcccagacctggggcctcagactgaaggcagctagccagttgcctctacctccctcactctgccacctccccaggcacgaggccaggatgagcagttcaggactgaaaagccatgtccagccattggccaaaacctgccaactctacctttttttttttttttttgagacagaggctcactctgtggcccaggctggagtgcagtggcgcaatcttggctcactgcaagctctgcctcccgggttcacaccattctcctgcctcagcctcccaagtagctgggactacaggcacccgccatcacgcccggctaattttttgtatttttagtggagacggggtttcaccgtgttagccacgatggtctcgatctcctgaccttgtgatccgtccgcctcggcctcccaaagtgctgggattacaggcgtgagccaccgcgcccagccaattttttatatttttagtagagacggggtttcaccgtgttagccaggatggtctcgatctcctgaccttgtgatccgcccgtctcggcctcccaaagtgctgggattacaggcgtgcgccaccgcgcctggccttaactctaccttttaattatctctccaacctgtgtcctcgtcttcatgcctaaatgtaactaccatttctggaatgtgaactgaggccctgtgctaagtgctttacaacgatccagggtcagacccagatgactctctgtggctgagatattatccttttggagaggacaaaactgaggtctgtgactttaactggcttgctccaggattcataagcaataagtagctgaggctcaatcagagtgacctcctgaccccaaaggctgtactgagaccctggtctgtactgtctctctccctccagctgcctagccttggcccagttcaggccctcacggtatcacctcgatcactgcagctgcctcggtctctgcatggtcatttcccccagactcatccctcacccaacagccagagacagcaagctcacacatagatccaactgtgtcactccctagtttccacctctttactgatatcccactgcctaagtctacacacctaaccacaagccagcaaggccctccccagcctctgaatacttctgttaatagagcctcccgccattcctgtctgcccaatcaatcctgaaggcttgcattcccagtagacaccaagctgttactttgtccctgccttcatcctctgagcctagaattccctctccctcctctttccttactaattcccactcattgcctgagagcagctcagatatcccttctgccatgctgatccccacaacctgggctggtagccatcctctagttccccacagctccctatgcgtgagtcttcatgacacaatatggtgaatacagggattctgtacatatctctgcactgagttcctagaagccaagaccatgtttgttcattttcatatctcgtaagtccctgtctggggctgggcacacagatacctctcagtaaaagttggttgtttaaaagaatgaaagggccaggcatggtggctcacacctgtaatctcagcactttgggaagctgaggtaggaggatctcttgagcccaggagttccataccagcctgggcaacataaggagaccttgtctttacaaataaaatgtttttaaaaaattagctgggcatggtggtgtatgcctgtagtcccagctactcaggaggctgaggtgggaagatcacttgagcccaggagttcaaggctatagtgagctatgatcatgccactgcactccagcctgggaaaaattgtgagaacctgtctcaaaataaataaatagataaaattttaaactaaaaataaaaatacgagaggccaaggcaggaggatcacttgagctcaggagttcaagactagcctgggcaacacagcaatacccagtctccaaaagataaataaataacatttaaagataaaataaaaatagaaaacaatgccaacacattaaaaaagaaatgaatggattcattttggccacatgaaagaactcttgtttctgagactgtcaattagatgatattttttttcctttttttttttttttaattgagacagtttcactgtgtcacccaggctagagtgcagtggtgcgatctcagctcactgcaatctccacctcccggattcaagcgattctcccgcctcagcctcccaagtaactgggattacaggcacatgccgccatgcccggctaattttttttttttttttttttgagacgcaatttcactctgtcacccaggctggagcgcagtggcgcgatctcggctcactgcaaaccccacctcccgggttcacgccattctcctgcctcagcctcctgagtagctgggactacaggtgcccgccaccatgcccggctaatttttttgtatttttagtagagacagggtttcaccatgttagccaggatggtcttgatctcctgacctcgtgatccgcccgcttcagcctcccaaagtgctgggattacaggtgtgagccactgcgcctggccccggctaatttttttgaatttttagtagagacggggtttcaccgtgttgaccaggctgatctcgaactcccgacctcagatgatccgcccatctcagcctcccaaagtgctgggattacaggcgcctggcccaattagacgatctgaagctctgagactgcagtaactgtcttgtccacttgacatgtataccagtgccctgtgtggaaccagcacatagtaggtgggtaaaacaagggcagatgaggagagttccagggccggctggtttggtgcaaggaaaggctgccagatgcaatcgtaacttcttggccctcttccttgggactttttttttttcgagacagagtcttgctctgttgcccagtctggagtgtagtggtgtgatctcggctcactgcaacctccgcctcctgggttcaagcgattctcctgcctcagcctcctgagtagctgggattacaggcgcgcaccaccatgcccagctaattttttgtatttttagtagagacagggtttcaccgtgttggtcaggctggtctcgaactcctgacctcgtgatctgcccgcctcagcctcccaaagtgctgggattataggtgtgagccaccgtgcctggcccttgggactcttgagtggcacttggtgatgctcaccacaccctccttggaatcctcttttctcttggcttctaggatcccatgttccttggttttccttcctctgtccatcactccttggcctctggaggtcatctcctcccccccttcccaacttcaaattgtctaacatttcagaaccatctctgcagaccactgggaaatacacaaacccagcctgggcaccacaccactccatccagctgcctccccggcctgttcctagacagaactgttgatctatccttataaatatgccattcttggctggatgtggtggctcacacctgtaatcctagcatttttgggaggctgaggtgggaggactgcttgagcccatgagtttgagaccagcctgggcaacatagggagaacctgtctttaccaaaaaaaaaaaaaaaaaaattagccggtcatggtggcatatgcctatagtcccagctactcgggaagctgaggcaggaggatcacttgagcccgagtttgagactgcagtgaactgtgatcacatcactgtactccagccaccctgggtgacacagcgagaccctgtctctaaaaacaaaaacaaaagcaaatatgcccctctcccaatcatccctgtctcaggaaatgaaatccatccttcttcctaggtgccctgtccagaaacctgcccttcaatccctgttctcttctacatccagaacctgctccatccataggtcttgttgattcttcctccaaaatccacttctaacttgtcccttctctccacaccactgcctggcggccttgtccaggccacctttatcttttgcctggacgagtgcagttgcttcctgactgcacactgggtttccattcttaacctctcttaaccagaggggggcttttaaaaatataccactttagtgagccgagatcatgccaccgcactccagcctgggagacagagcaagactccatctcaaaaaaaaaaaaaacaaaaatactgctttagacccctccacaaccacccactcctctaaggccagtgccagaattcctttgaggtctgccaaatgcccagggctactgacctctctggtggccacttgtgtctcccttccttcctagtaacaccacccttctctctgggttcctccagagtgccaggttcccatcccccgggtcctttgcccgtgctgtcccttcttccagaatattcccagctgccctcccaatgctttacctggcctgtttcatttcccctttggccttagcttaaccatccattcccaggaagtcccttcttttctgtcattgctccctgtttgttctctccattccatgctccacagattacaaatctctgcttctatctgtgtagttctcttgcttcatcctctctccaccccccttctcatgcacgttccctgagggcaggaaaggtaactaacttcttcatgtctgaatcccagagatgggtacagtgcctgacacccagcaagtgcaccacacagttgggcagtgaataagaaagagcaggttcccaggcagagagggcagtggagccagcccttgggcaccttttaggtgattaaaacagctgcctttgacatcctttcctcccaagatcctgtgattctatgaccttgcccagcccactatgcacaggatctcagaatgggggcagaggggtgcaaaagcaaggtgatgcccttctggaattttgtcagatcctttccatgtacatcgaagctgcctatcctgcccattctgcagaacaaaaggcaggtaggtagagcccaggaaggtggagattctaaaacggctctgtccaacacagcagccactggccactgcagctattgtaaatgcagctgtttaaattacttagaattaaataaaacattagcattcagctcacactaggcacttttcaagtgcttagtagccaatgtggctagtggctattgcattggacagcacatttacatcatcccagaaagttctattggacagagctgctataaacaggtcaaattccattgacattctccccacctcaacctcaaggaaacaggctgagtggagtgaggtgtaaacaaaactccatgggtccagttgtgaccaaggctgaccaggagggcacacttgctgcagacacaggtctcctctcatttctctccacaccctgaccagccggatgggagcaggaacaacttgacaaggaccccaaggcatgtaagcctcaaacagtattcatgtggccccagaatgtgggtcccgagcctcctccccgggctcctgggggccccttgctttgggaccccactaagagaagtccagcactcagcagacagggccgggcgccccctgctctgacagccctggtgagaaggggctcccctgcacctcttctcacgcatcctcccgggggctgggacggggagggctgaggaacttcctctggggggcgcgcggtgacagagccctcggtgggtcccgcagaggcactgagcctccgcccgcccgtcccgcccgctccgggagggggcgtccagcccggcctggcgcccccgccccgtccgctcgcactcacggagacacaggagccaccatcttgggcggtggacgctctggccgcggtctccttgggctccacggagcgacagcagccactagcggcaacgggggcgaagaggcgccagcagccagcgccggccagggtcccgggcagggcgggcggcgcccccggggctcacctggccgcgcccacctgcggcgcctcccgcccagcgcgctcagcccggccccggccccaccccccagcccctgccgccccacgcgcggcagcaggagccagaggctagaccgcaggcagcgcggtgccggggttcattcggtccgcgcatgtatccggggttcctcgaggggctcacagcctaagccacagacaggtagagcgcggtagaggctgcaaagtgttctgagagtttggaagcaagtgctttgggatcacgaaggagcgggcgaccagctgaaggtctgcagggcgggtcaattagggttcgcagcattctgggtaagtgaacttttactaggggaagggcactccaggccgtgggatggcagagcaaggattcctctggaagttgacaggtcgctgcaggttcatgaagaattggggtgggtgggggcagtgcctgatgctggatggctctaggggaatgctggggattttgaccttcccacctggtgggaagcctcctccggaggagttggaactgggaagcttattgttttagcctagtgagttatttgcagtggggttgacagagtggggaagagggagggaggttggcgtgacctttttctaaaactctgatacacagccgaccctcatcccggtctgcgttactctgagaggtgaattgaggagcttccctgcaagaggaatgtgcagacgtggaggtgtggagtccagaggcctgggatggagctccagttatatttaactctgaggccttggactggacacttagctatgagcctgtttcctcatctgtaaagtgggaattacaacttggggaggaggctagggcaggacagaaatgggtctgaagaccaaatgaggtgctaggtgtggaggccattcagagagggggctggcctgctgctgtggatcaagggcatgtccagacaatgacccagtctccccttccagacagcacaaagtcacccagaaatgccttccagtcccctcacaattgggtacgctgctcttctgcaaaaggcctagggtgcatgttgatttgaggtcccagccccaccagtggctgctgggaactcctctgccccagcatcctccatgcagcactgctctgtgccacccaccgtctgcctctgacattcactgtgaaccccagccccagagctgctgggatggagcgcgaatcacatgcacacacacgtgtggccgcctgactcctggctacactcaaatgaagggagatgttgcagcccccacagctgcccccgagtggcaccacacagccctcaggtctagaattctgcaccctgaaagggtcaggttgggggtaggtcttcttggatggcattttgctgcggaacagccaccttaagtgtcttggagcagccatggctcattagctaactgcctcaagagggtggggtgtggtcagaggtatgagcaagccagaccagtacagaagaagaggctgcccccaaaggtccaaccgaggctggggcagggcacagagcagaaatcttatgaaataacatcaccctggctgccaccaagggagaagatctgggaaaaccacatcctgctattttgccataatgggaaaagacagacagacagacacacacacacgagcacagagacacacaacctgaggcccatatcacccatggatagtggcaggtttagacatcaaggcacatacatacatacctccccccacacttagaccatgtattctatctacacacgagatgtgtatacatatggaggtggtactgatgccaagatacacagatacccatgctggctgggaggcaaaggcaggcacactggccacacaagagcatgcatgcatacacagatgggcacgagcaacaaagacatatttgtgtatacatatacccagagagacagatgcacatgaacgtacagactcctacaaatgcagttacagaccatggacagcaatgggcacacagtggcacacaccttcacaaagatagatgcatgtacacaaagagccatatgcagatgcagagaccggtgtgcacacacactccccttacaaagttaaatgcatcggagttaaaagagcatatctccaaacagagtctctctcccactctttccccatccccctacccccaagtcacggggcagacaatagggtcctcccagaagcacatgcctgcacacaacacatctcaaataatgacactgccatttctatcatggataaaaacccaaactctgcgaagaatatgggagtccaggggagagagagccaaagtggagagtgagaggttgagccaagacccactgcatgcccactcccaccatggccagggggttcctccccacattctccagagcccccaagccacttctgggtcatctagcactcaggatgtgcagactgcccccaagctggaggaagactccaaagcccaatcacaacataaactctgcccccagtcgcactgcctccaggcccttgcccccaaggaaagggttcccccaaatagcctttgatgggtgatggctgtctccctcaaaaaaggccaggcaaccgtctgtgtggagaggtgagctgggagaccacagataaagagggggaggggagcattgatttggaccccagtgcagtggctggatctcagggaggaggcaccctgatttctgtccccctctgtctgcttccctctctttctgtgctgcagtaacagctctctcttcactcccctcggacgtctccccctcccctggcccctcagaggcagttaaaggtgaggtctgatacaaggaacctttgacatgggctccctggacaggcatctgcccagatgtccagcacccctgtttcccgcagggtggacctccagctccccagcattcctaccctttctttcacctttgttctcggccagagtgggggcttccctgcccagctctgcacctgggaaaagggttgagagtaactggctactggtgtctctgagagacaacttttgggggccaactatagcaggaaaggattgggctggggagaggggagaggaccaccctcacctaagccctctccccacttcccagcccgggcgtcatcagcactcacccaagagcattctctgcctttggaggcaccaccgcggagtgcagaacgaggagcaaatgaaacccagccagagtgacagagggaagggggggatgtgagggacaggaggggagggcgcgagggagggactcctggttctgcctggaaagcagcgtcgttcctgggccctgtctctctttgccaggaaggagctgcccattctctggtttcccccatcccaaccacaggtggaaagaacagggcatgttcttcccccaggggagaagtgtgggggcaaatgtgcagaccaagaactgggggaggatatcggggagcatccctcaccccctactcacagaggattcccttgcctggggcctcttacactgaagtgaagggttggaaggactgactttgtccacagggacctccagggaaggaggagctgctggtcctgctctgcctgctggatggctcttgccgccctcttgcctcaggacttgctgctgcaggagcccgttttcctgcccagcctcactcatcctctcctcaccatccccttatgtttaactgctgttgctgaagaggaaactgagcctcagagaggtgttgccactttatcaaagagcactggccatgcagggtttggggagcagggatccaggtgtcttgccactgttagtctagtacctggacccttggatctgctatctgggcgatgccaggaaggagaggagggagtttatctgatccactagaacttctttttttttttttttctgaagcagtgtttcgccctgtcacccaagctggagtgcagtggcaagatcttggctcactgcaacctctgcctcccgggttcaagcaattctcctgcctcagcctccagagtagctgggattacaggtgcctgccaccatgcccagctaatttttgtatttttagtagagaggaggtttcaccatgttggctagggtgatctcgaactcctgacctcaaatgatccacctgccttggcctcccaaagtgttaggattacaggtgtgagccacagcacccggcctgatccactacaactcctgacacccctcccatgcccacccaagatcccccagccccattcttctcctctccattcactccttcctctccctcctcttcctaaaagctggctctttaccgacctgagcacctggtggctgggagggggtggagtgggggaaggaggcagccagcccacagctggatccagtcctacatccaagcccaggtcccgatgctagcccccgaccccctcagcatcctgtctccaccagacaataacctgtaatctctggagcagccaacattcacaaagaagatctgggaggggttggcagcggcagctcctgaaaacaggtttgttaggaaggggctctggggggaggagttgtttgtgtggggagaggaaggaaactcaagcccagagctaattaacccacccagagacacagacagaatctttgtcttcttccagggcagggatctgagctaagccccctaattctgtacccagacagccttgcttttcctggtggtcctgggggagggggatgccaatggtcagggtcacacctgggggagggggatgtgatgacattcgggaagagcgtggggcacttctgtcacctgccaccaagggagaatagcagcaggaggcagaggcaggtcagactgcaagaagaacttctcagtggccttgggggagcacagtttctttgcagcatgcacccaaaggcctcagtatgtgtgtgggaggccgtgactggggagaaaacggcaacccagggagataccgaaggatgggagacaggctggagggcttccggggcctcctgatgggactgaaattaatccatctgcagggagtgggggtgagaagctcatcaagccagtgactcaggcgtgacttgagctcaaggtctttgatctctggggcccaggatgcagccagaggcttctgcagtcaaagacttggaaaggggatggagggaccgattcaaacaggagctaggggaggtctgaggatgcagagtaggggagcctagatttggcctgccactcttaccactacccctctcccgctggaaggcacagggacatgtagtgtagctgcagccttcttggccctgaaatccactatagtctgactcgatctctgctaacctgtcccccgtactgtctaccttgcactccctgactaaggttcttcaggccatttcagcaagccagagcttaagtcatttcagaaatgccctcctctcccctcttgtgtcatgttgcaatggatgccatggggcaggcccactctgaattggatgactgggttctttctaccaagagacaagggagggactggttgaccttaagaagctagtctccccatccctagccagatggctggcatctccccatttttcagttgagcacaccaagggacagggcagaggagtggccatgggtcccgagcatttgtggaatcatctgttgggacagcctgccctctctgggccatactcctccccattctcaaacatggctcagttgctcctaatatatgctgttctcctcagcagggcatcagagaggagtgtgagatagaatttagagccagaaacctggggctgggtgcaagggctcacacctgtaattccagcactttgggaggctgaggtgggaggattgcttggggccaagagtttgagaccagcctgggcaacatagcaagaccttgtgatatggtttggctgtgtccccatccaaatctcatcttgaattgtagctcccataattccctcatgttgtgggagggatccagtgggagatgactatcatgggggcagtttcccccatacagttctcatggtactgaaaaagtctcacgagatctgatgggtttatgaggggaaacccctttcacttggctgtcattcttttgtctgccaccatgtgagacgtgcctttcaccttccgtcatgactgtgaggcctccccagccatgtggaactgtgaatccattaaacctctttcttttgtaaactgcccagtctctggtatgtctttatcagcagcatgaaaatggactaatacaccctatctctacaaaactttttaaaaataaaaaaaaatttagccaggcatgatggtacatgcctgtagtcacagctacttagaaggccgagggaggaggactgcttgagcccaggaggtaaaagatgcagtgagctatgattgtgccaggtactccagcctgggcaacagaacaagacgttgtctcaataaacaaaacaaaacaaaacagagtcagaaacctaggacccaaacccaactgtgtggccttgggtgttacctaatctccctgagccccactctcccagtttataaagtgagactgaatgtcatcatccgtgcctaggatggctgggtgaggaggaaatgccatgctgcaggtgcaagtgctttgttcagctcctaagcagatcctctgtgtggggctgggggtaggtcattgctccttgcccagctgtcccccgatgccctgtgctggctcaacatctgtatcagaggttagtgcgaggggacagcaaacctctgtctctttgcagttgtcagagaatcacttaaagttatttaggggtgtgcgcgcgcgcgcgcgcgtgtgtgtgtgtgtgtgtgtgtgtgtgatggtccatagggtcatggagttcagccttcttctggggaaggtccctgtgccacacccccattgggaggagaggcaagggggtgaaagaaggctcaagatgcattcctgaagaatgaaagaggccaggcgcagtggctcacgcctataatcccagcactttgggaggccgaccaggtggatcacctgaggtcaggagtttgagaccagcctggccaatatggtgaaactccgtctctactaaaaatacaatattagccgggcatggtggcaggtgcctgtaatcccagctactagagaggctgagacaggagaatcgcttgaacctgggaagtggaggttgcaatgagttgggatcacaccactgcactccagcctgggcaacagagtgagactctgtctcaaaaaaaagaaaaaagaatgaaagggcttcctgggcaggagacagatggggggtgggcagggtaagtcggggcagtgcttggaggagggagacgaagtgtgggttcctgctgcttcctcctcctgtgcccctccaaggtattccagggctcactcagtgctgggagtaagaattccaggagccagatactgctgaggaaggaggcctctgactgagatcttggtgaggaggctcagagaggggagaaccaccccccagtctccctcccacagatggcctcaggggatgtgagcaggagagggtccctgccttactgcctgtaaccacctgtcactgtggaagcctccagccctgcaggcccctaatcaaagcgacagctcccacggaaaagtgcccctcctggctgccagaggcccgagacctcgtgtctcaatctggcatggcgccccggacactgagtgcctaggaccaatgcagcgcattcaaggctgcccacacttagcctcagcctccctggaatggctgtggccctctgcattttccccagggagcctccaccagggagctccaccctaagggctctctgctttgtggagaggggcacactggcctagtccccacctgggcagagctggaagaggcatccagggcggctgaggggcccaacgtgctccccctcgccctgccccccacctcaggggcagttgctggcatctttttttatttttattttttgagatggagtctctatcgcccaggctagagcgcagtggcgtgatctcagctcactgcaacgtctgcctcccgggttcaagtgattctcttgcttcagcctcccgagtagctgggactacaggtaccccacaaccacacctggctaatttttgtgtttttagtagagatggggtttcaccatgttggccaggctggtctcgaattcttgacctcaagtgatccacccgcctcggcctcccaaagtgttgggatgacaggcatgagccaccgcgcctgaccaagttgctggcatcttcttgctgggggccgccctccacccccagctctcagataactgaggagacaggagaaagccaggggaggggagtgggtgttgggagggtcatggcccagggcaggcccagagttcaccaggccaatggagaaggcagcttctctagctggagccccagaattccagggctcctggaaatctaaggacccgtccccactgccttaggcacagctatcactcccctcccctgccccactcccacagtgctggtcactcctcctaggctgggtggctgaaaaggtctggttccatgtctgcctcctcctctagactgtgagtgcccagaggcaggtaccaggcactgctcagtggtactgcccagcatcctgcctgagcccagcacagggctggagggagaggtgacagatgacacacaacggatggccagtgacttcacaggtccaatttaacaatctggactggagtatcaggcctcacgtctcctgatgacccctaagatggtgcccccacgcccccgttctgacccagtactgaggggcatggggactgtgggaagaggaaaaccaggtagagggggagtccgcagccatctgggcagcctgtctctagctgggactctcttctggagctgtgaccttttttgttgttgttgtttgtttgtttgtttaagacagagtctcattctgtcgcccaggctggagtgcagtggtgcgatctcagctcactgcaacctccgcctcctgtgttcaagcgattcttgtgactcagcctcgccagtaactgggattacaggcatgtgctaccatgcccggctaatttttgtatttttggtagagacggggtttcaccatattggccaggctagtctcaaactcctgacctcaagttatcctcctgcctcagcctcccaaagtgttgggatgacaggcgtgagcctccgcacctggccctggagctgtggtcttttctcctctccccacacctgctcccttcatcttggtgtggtgggattgggaagggaggagcttttaccacagggaccgttgcccaggaagtaagacctgaagaggctgtgttacaagaggaacaaagaccagacaacatcctcagccacaggactggccttccccactcagtgtcagccctccatttctgtctccctctcagcaccccctttctgataactgagctgccctctgtggcactgcctaagctagaggtgtccgtggcaccccccacacaccccacatcccattggccaccaagtcttgacagttctgctaaagaaaaggctccagaatctatttctccatttcacctcactttccttcttatgtaccctcgagccagagacacctaaaaacactaactgctcctgctcaaaccgcttctgcaatgcccatcaccttcagaacaaaggtcaaagcccagcctggtggcaaggctcttgcaggtggctcccgctgtcctctccacaccctgcacactccctgcacacacccagcacactgatggccagtgacttcacaggtctgatttaacaatctggactggagtaccaggcctcatgtctcctgatgacccctaagatggtgcccctccccacccaaagagccatgggcttgcaggcctcaatgcctttgctccggctgcttccctgcctgggatcctctctttgtctccagtatccacgatcaatgtcacttcccatgtcagtttgcctctccctcctctgacttctatttttattttattttttttgagacagggtctccctctgttgccccggctggagtgcaatggtgtgatctcagctcactgcagcctccacctcctgggctcaagcaattctcgtgcctcagcctcccaagtagcggggactacaggtgctcaccaccacaccaggctaatattttgtttttttagtagatgaggtttcgccatgttgcccaggctggtctcgaactcctgagctcaggcaatctgcccgctttggggtcccaaagtgttgggattacaggcgtgagcctggcccctcctctgacttcttgaggcaccctgaatccacctctaggaagcctgttattatcttggaacaaactcatctgcatatgtatttatttagatagctttttcctgacaggcagatatgatgtcttttaaaaacatgaatctcccaaaagcagcttacacctagtaggtggtcaataaatatttggtgaattaatgagttaatttttttttttttttttttttttttttttttgagacagggtctcactctgtcacccaggctggagtgcagtggcacaatctcggctcactgcaacctccacctcctgggttcaagtgattcgtctgcctcagcctcccgagtagctgggactacaggtgtgtgccaccatacctggctaatttttgcatttttagtagaaatggggttttgccatgttggccaggctggtctcaaactcctggccttaagtgacccacctgcctcagcctcccaaagtgctaggattacaggcatgagccaccatgcccagccaatgagtgactttcgaatccagacagacacatatgctccagaaacacccatcagtcagatactctcttgctcagagtcatgcttttggtgtccagcctgaaataattgggtggggaggagctggtcccagtcaccagagcaccctggcctttgcttatgccgtgacctctgcctgtaatgcccctactcccctcatccatgttccgaggctcagccccctcttccttcaggagactttcctgctgcccccagggactgcagctttgcctttgtgccctgagggtatgtcccatgtggcaaccacaacccttatcccttttcacatgtgtctccacccaaaagacccactcaatcttggggagggtggtaagcagagagattggatcttacttgtctctggcctacaggattgtgtgtgtggagcgggggacacagtgggtgccccatgaatatcaccaaaagagaagacagccctcaagagggtgtctgaggtcagagtgtagcctccggcaaaactgccagcctgggctgcaaggtaggtttctgttggcctcccccaggagccaggggtaagttcctgcctttcccacctccccacactgagcctgaatgtgaatctgtttgctctgccaacagcagcctgggtggttcttactttccctatggcccctgtgcacctgtcagctagaatcaccctcatggaggcattcacccatttcccccagaaatctgccttgcagccagctgccccttccaagctcatagccaaacctctgcaaagtcaccccagctagggagaagcagaaatcctggccaggagtccaaaggaagaggggcctcccccttgtccctgggttggagtgctgtgtaccttgctgaccttggccttcagagaccacagacctgagctggagcctgggacccccaccccgcagatgaggcccttgtctgaaagcctgtggctaccaggaggctccaggctggagaagtgctgcttaggagtcctgatcccaaaagatcccacagggagagttccctagaaacaaagacccaagaggcggcctaaggacccacagattccgagaggtcctacagaagggttgtccagatgcagaataaaacttgctggcatcggggaggcttcagaccctaagaccccattgagggcaccccagacgcaaagacccccatggagggaggccacagacccagagcccctcagaggggcccagacagagatactccccaaaccaaatttgtgggagcagcgtcccctctacactgacctggccctgaggggctcttccccaagctgagctgccgaagccgcctctggtgggcccgccccccacagtgcacctgggcctgggccgccgagttcagctggatgttgcagacatcacagagcgtgtacgatggccgctttctttctcgcttgggcttaggtggttctgggggccgagggaggcactcagcagctccagatatgggggtctccttctcagccggtgggggtgggctcagtggccgcttcatatctgagtggatagagagggagatgaatgaacgccaaatggttgcgaattcttagagagagcaggaggggctcaagaccgggagacacggggctctgtatcctctatatccctctgaaatgccccagcccgaggatggtggaagggcgcataatggggtctatttcaagcaaagcagcattaaaacttgggactcttggctgtggctcacgcctgtaatcccagcactttgggaggccgaggcgggcaggtcacctgaggtcaggagtttgacaccagcctgaccaacatggtgaaaccctgtctctactaaaaatacataatttgctgggcatggtggcgcatgcctgtaatcccagctactcaggaggctgatgcaggagaatcacttgaacccgggaggcggaggttgcagtgagccaagatcgggtgtcattgcactccagcttccacaacaagagcaaaactccatttcagaaagaaaaaacaaacaaaaaacaaaaacaaaaacaaaaaaacttgggactttctggaagggtgtccgacatgtctacacacggggaggccaagacacctggggactcggagggccgcagaacatatctcagagaggcggactggggtcttggaggaaaggtggtcactgagggagaggcagtggcaaggccagctgagtcacatttgaggaagcgagagtcctgttctcagctctacagcaagcgctggcaatcctgtgacagccaggcatgtggcgcttactggagacgcagcagccgccagccaaaaacacaaccttcctgtgccctgcacccagcagggtgacattcacaaatggtgacagtgtgtgaagccatcccaacccctgctccacgtggctccagatgccccctgctgtcttggcaaccgaggccgaggcaacagttggtggtttcggtagagacctgagccttgctgcctgggtcggctgaagacagcgcccctgcccccgccctgtcccccaacgcgcgcacacgcacatacacacacacacacacacacacacacacacacacacacacacacactttctgtctcttcgggaccctcaagtggcccctccaggcccccatctcccatagacagtctttcctttccaagtcacttctctgaaacttgccctgcctgacttgtctgcctctaaccatttctattctggggctgctcagtgaattttgccttctctcggaaatctgcgtgcatgcttcctgcctctgcttcagacaggggcttcctgagagcaagatctgtgtccctccctcaggctggggcaaccccaaggctagggcctgggtgagtcatactgagcccatctctcctgttatggactgaagtgtgtcccctcaaaatgcatatgttgaagtaataacccccagtaccttagaaagtaactctatttggagatggggtcttcaaagaggtaattaagttaatgaggtcataccggtgggccctaattcatatgatgggtgtctttatttttttcaagatggagtctcgctgtgtcacccaggctgtagtgcattggtgtgatctcggctcactgcaacctccacctcctgggttcaagtgattctcctgcctcaactcagcctctcaagtagctgggactacaggtgtccgccaccacgcccagctaatttttgtatttttagtagagacagtgttttgccatgttgtccaggctggtctcgacctcctgacctcaggtgatcctcccaccttggcctcccacagtgctgggattacagccatgagccactgcacccagtgggagacagagtcttactctatcacccaggttggagtgcagtggcacaatctcagctcactgcaacctctgcctcccggattcaagcaattctcctgcctcagcctcctgagtagctgggattacaagcatctgccaccatgcccagctgatttttgtatttttttttagtagagatggggtagtgccatgttggccaggctggtctcggactcctggcctcaagtgatctgctcacctcagcctcccaaagcgctgggatttcaggtgtgagccaccgcgctgggtctcatatgactggtgtctttataagaagaggaaatttagacacagatagttatagagggaagaccatcttcaagccaagaagagaggcctttgaagaaatgaaccctcctgacaccttgatcttggacttctagcctccagaactgtgagaaattacatctccactgtcgaagccactgagtctgtggtactttgttatggcaacctgagcagacaagctcatctccccagagggcatttcctgtgttctgaggcccatgcttactttgcagatcagaccagtccagtgatgtcacaatgtcttcacaagactatacatccaacagtggagcccgcatctgaacaaggaaaattaattttacaagcccaaggccaaaaacctgcctgtagtccccagatgccacccccattctcagtaagctgcttgtcctttttgtgagcagtgatcccacataacatgtctgtcgtgacaagtgtggggactgtgtgtggatggaacagaggagcacagcgataagggcaggagctctttgaaattttatgtatgtttaaaatttcaatagagacagggtctcgctatgttgcccaggctggtcttaaacttctgtgctcatgtggtctgcccgcctcggcatccctaagtgctggggtacaggcatgagccaccatgcccagccaagagcaggagctccatgctgattcatacctgggttcaaatctcagctctgtcactcactggctgtgtgacctgagctcagttccttcgtctatacctctgtagaatgggagtgatcaataacagttcctaagtcatacacacattgtggggattagatgagctgatctataatctatgtaatatgcttctcggtgccctacaaaatcagctgttttttgtttgtttgtctgttttgttttgttttgtttgagacagggtctcacactgttgcccaggctggaatgcagtggcactattttggctcactgcaacctctgcctcccgggtgcaagtgattctcctgcctcagcctcccgagtagctgggactacaggcgcgtgccaccactcccagctaatttttgtatttttagtggagacagggtttcacaatgttggccaggatggtctcgatctcttgacttcgtgatccgcccacctcggcctcccaaagtgctgggattacaagcgtgagccactggtgcccggccaatcagctgttattaacacatagtgtgtctgtctcttgcagcttgtgagtgaagtctgtcaccctgtgtgtctgtcatgatgtacctgggtcactgcaaatgtctgttaccccatcgtttgttgaggtgaatctatgtcactcactctgtgtgcatgtcgtagtgtagctgtgccatagtgtgggtgtcattgtgcccagaccatgaaatgagactgtcactgaacatctgagactcactatgtgatattggttgaattatgtcccccaaaattcaatatgttgacatcctaatccccagcacttccagaatatgaccttatttggaaatagggtcgttgcagatgctattaagataaggccagactggtatagggtgggcccgtaatccaatatacatgactggtgtccttatgaaaaggtgaaattgactgggcgcagtggctcacgcctgtaatcccagcactttgggaggccgaggtgggtggatcacgagatcaggagttcaagaccagcctggccaacatggtgaaactctgtctccactaaaaatacaaaaaaattagccaggcgcggtggtgggtgcctgtaatcccaggtactcaggaggctgaggcaagagaattgcttgaacctgggaggcagaggttgcagtgagtcgagatcgtgccatggcactcaagcctaggtaacagagcaagactccgtctcagaaaaaaaaaaaagagagagagacagggtcttgctctgttgcccaggctgaagtggagcagtgtgatcatagctcactgtaacctcaaacacttgggctgaatagatcctccagcctcgggctcccaaagtgctgggatcacagttatgagccactgcgcccagccttgctgacacatattgatcttggacttttaggatccagaactgagacaataaacttctactgtttaagtgccacccagcctgtggcactttgttatgggagccctaacaaactaacgcgccatagatctcaccctggtgtggtcataagtgcttggtgatttgatggtccaaaccctgctgctagggtttggatgttgtggctgggcggcagtcccacagatagcctccaggtggcgcagcaaacatccagtgggaaggtaggtgaagactccgtaccccctgggcatgacagaccccagtccccacactcaaggggcaatgcagctgtctcctggagccacaccacgggtccagggtatagctcttcccacagagggcacactggaggtcactgccattgtgagaaggccccattactgcatggagccccccaccaatattttgcaccttctcacctctagatggaggtcatcacagcgactctcctgcctctccatgtcctccccaactctcccagcaggaggaggcaggaagaaggtcttaggtgcaagtgttggtggggggagaggtcccattccccgggtggaggcttcagaggaatgagattttcctggccatgccaaggagagctgcctgccccgccagcatggggacaggggtattttgaaatctcagtgcaatttatgacaggcgggccggggacatcgcccaagagagcaaatatctgccacacagctgattaaacctctgtgatatatagcctctgggctcacggggccgcctggattctgggctaattgtgttccccccagccaggctgctgggcctgctgcagcctgccctgcctgacccagccttcccagctgttcccttaggagccacactgccccagctaagctaggggagcccagtcagaaagtgtggacgggtgggcagtgacgggggcacacaggtctgtctaaccctgccctgagcatcggcagctcggcatccccaaccctggcccctactcagagccagcatgacccacgctagcaggacctacacttggacaggacctagtccacatgctgccttaagcagatggggaaactgagttccagagcagggcagtggacttgcttcaaagcaaatggaaagacgatgcatgagctgattatagaggcttccctgtctttctcttcgccccccagctgcttacgtcacatcttctttatgaaataacaaccccatttattgagggcttactgtgggccaggtgtttgacaaaaagggtcttttttcttttttgggggggatagggtttgactacgtttcccaggctccaggctggcctcaaacttgtagggatcaagtgaacctcctgccccagcctcccaagtagctgggattaccggcatgtgccaccatgcccaaacaggatctctcttaaacttcacaattccatgagatgagcaccattattaacctgttatcccactgcatagattagagaacaggctttgggaggttctgtggctggacctggacctatgcttgtctgactcaaagcccaagtccttacccactgccccatcccacctctccttaaagcctgccaaatcctgacctgaactgatgggtggggagggggccacagattcagagaagggctctggggaggggcagggttgtgcagcctctatcaggccctgtgcctcgcagagacgggctacaccctgggtagaaagaggtggggccagagccaaagaggtggggaggaaggacaaggggaaagcagagaaaaagcgtgtatgtacccatccatctgtctgtctgtctgtctgggatttctacaggaagctggttaaatctccctctgttccctgtcttccctgagagatgggctgaggctgctgcagagagggtaggggttgggccctgggagggagccacccacttggaggcaggctcacactacctgtgctggagagctgtgtagcccagtttctgtctgcctgtctgcctgtgtgtccatcaatgtggagctggggggtgggttggggggagcacgcaggcagggctctggggtcccatctccaccacttctggttgggtgacaaatgcacgtgaggtccctgggtttccatggggtccttggccaccgtgaggtgatgagattccctgcctgtccatccagagagggctgaatggaggggactgtggaggccagaaaacaggcagcagacggttgtttctgctgcagcctgggaaaggagtcctccagaaaaggctgcttctcctaaagaggtaaccggagaggaaggttcgagacctgtccccagcctttggcagagcatgaagggttccctcctcaaacccttaacaagcccagttaccctctggcattttcctccatgtcagccaacagccaccctcccgcctccccagcctacttcccagaccaggccaggctggctggccggccaaacttgggccagaccctgcctcgctgggctttggtttcctgtctttaaagagagggggccaggcgtggtggctcttgcctgtaatcccagcactttgggaggccaaggcaggtggatcacctgaggctgggagtttgagaccagcctggccaacatggtgaaaccccgtctctactaaagatacaaaaattagccaacatggtggtgagtgcctgtaatcccaactactcgggaggctgaggcaggagaattgcttgaacctgggaggcagaggttgcaatgagccgagattgcaccactgcactccagccccagagacaatgaaactccgtctcaaaaaaataaataagtaaaaaatagcagggcgcggtggctcacgcctgtaatcccagcactttgggaggccgaggcgggcggatcatgaggtcaggagatcgagaccatcctggctaacacgatgaaaccccatctctaccaaaaatacaaaaaaattagccaggcgtggtggcaggtgcctgtagtcccactactcaggaggctgaggcaggagaatggcgtgaacccgggaggcggagcttgcagtgagccgagatcgcgccactgcactccagcctgtgcgacagagcgagactccatctcaaaaaagtaaaaaataaaataaaatagataagagaggggattgggctcctaggtcctttgcaggctgaattgcagtggccacacagagccgctactgctaaggtggaaggcagtggaggccaaggtatatgattctgccttagcctgggagaaaggcagggtgggtgcacctggtggcaagcgcctgttgtccctggagcacaacagaaacatcgcctccatgaatcctcagaacaatcctgcgaggcttgacacatgaggcaactgaggctcagcatcacaaagagaggcaagtaggtagggccaggtctcctccattctatgaggcaaaggcagggggtgaggaccctggcaggccccatcccagtcattcatggggtcacaggcaggagtgtgggatcctggccctccctaccagcccagctgcagagagaagcacctggaagaagagaagcctcatctgttcctgtcctagcagagtgcaagccctcctgggcctgggtacccgctgagtgtccctgaggggccgtcaatgagcattttggcttctccaccctgccacctccccactgccctctcccagcactgacacctccccagggcgaggaaggggaaacagccctctttagtggtgtggccaccacagagtggcacccatcccagctattccatgggcccagggagctggggtcacccagggccacaccctgagatcccctcagaggatccagaggagtcacctgcgccagaccccagcacatacacccctgctttgccagaacaggaggcccgggggctaggcaacagctgctccaggtgccaggtgaggggttccgctggacacacccaaggcaccatgtctgtcttcccatctgaagtggtgacagaggaagcctgtcgccttcccctggggccttctgggtgctggagatttcaggagtgagctgctgaaagccaacactccagctccaagggagggagagagggcacaggaggtgaaggagcagtatggtccagagatgaagtcactgtcccccaccgcctcccctccctggtctgctctgtcctcacccccagttgtctgcatcctccagagggcctcagtccctcctgacacccccaaagacaggggctggctctgctggccactgacactcccccaaagacccctaccctcaggaaggaagtccttcttgctgtctaacctgcatctctccttgcagggtccatagtggcaacacagagcagctgcttgtaaggtgggatggttgtctccataccccctgtccttgcctctgctgccaggcaaagcccaggaaatctgacctattgccctgttcacactcagcaggcagaggagacccgccggccccatgccccctcctaggagcaccagggctcaggatcctggcacagcccgggtttatctcctgcctgctctcctgctctccctgcccaatcccataggacccagaaggggagctccctcaaaccccactccctgctttccactagtcaccacgtccaagtcagggcaggagcctaagtcctggaagccagaaggaggagggttgggagctcctgggactgttcctgagttgtgggtgggggcagagtgttctggccaggggcccccccatgccccttgctgaagctgagacattctgcacgttgggggtaggaaggggcgggacaggaagtcctccaatgactgtgaatgaggtggagggtgggggagcaggagtactttttgcaccccccaaaagataattgttgctcttccctcccctaccccttcccttctattccatctcagtgttgataggggtggatcaacttttggattctctaaacttcttaagaaaagacggtgggttatctggtcgcgccccctatctccggagaatggtcctctccttagggtgggtgggagtagagggggagtctcaccctgtactccctctctccccctaatgggagctggaagtccttcttgccatcacccttggtgtcctcctcgcgacctcagtttccggttaagttgcggttctttcccggtcaccaggcaagaagggtctccgccgctgcccccagccctgcagaaccacctaagtgctgagcacgcggcgggccccctcccgccggctctgcccccgcggcgcgtgggtccgggatgggcggcggggagtgcgggcccgagtccggcgcccgcgcctacctggagagcgctccggacaaacccggctgcgtccagccgctcgcggccacccggggcggtcctgagtcgcagctcccggccccgcgctctcccgggacagccacagcgtctccgagcccgcccccgggcggcccgacgggagcaggtgccaggagccgcgccgcccccgccggcccaggacagccttggcgggagaggggctcagcggtggggctccccgggtgggaggaagagaggggagactcggaggctctcctggctgaagagctgcgcgcacgggtgagtatcccgcctaccccggctgaccaggcccagcgtacctgagggctcccaaggtgtcccagagctcagggaaggggaccccaaactggctgccttcccccaccccctgtcagcaccaccttccgcccccggccgctacctctggcaagcaggcccctcttttgcaaggaaactcagggagtgggaggaagttgacattcatggaccacctgctgggtgccagggggatcacactgaaacctcagaaccactctgcccagagcggtgcagttccccattttacagaccaggaaaagaaagattggggacttaggtaggcacggtggctcacgcctgtaatcccagcactttgggaggtcgaggcaggcggatcacttgaggtcaggagttcgagaccagcgtggccaacatggtgaaaccctgtctctataaaagtacaaaaattagccgggggtagtggcacgcctgtaatcccagctactcaggaggctaagatgggagaatcgcttgaacctgggaagtggaggttgcagtgagtcaaaaccaccccattgcactccagcctgggtaagaaaagtgaaacttcgtctcaaaaaaaaaaaggttgtggaccttaagtaactggtccaaagtcacacaggaagtgggcaccaaatgggagactccaggctgctcctaggcactgtctctggaggtcaggggagacagccagagtctgctggggagacttcaccagtgtgtgtggctgagagtcctttctgattcctcccagggaatcaaagcacagggtccagcacacagtgggcacacacaggggcatggagccaaccaggaagagcaggaggcaggggctggtggcacgacctcctaagagcactgtcaccattctgttgttggagaagcaataacagggcaagagagcaagaaagagccaaggaaagcggacacagagggctcttgcagccaaagaagaagtggcggtgccatttacctgcctggcactggggcaggcctactggggaccaggccacacagagaggaggccccatggtggggagcctcagggatgcctcacccacggtgccaccaagtctcctagcacttcctggttcaccaaccaccaactcacccctgccttgggccttgcccctgctctcccctcagtctggaacatcctcccaacattcacagagatacctccttgtcactcaggccccagctcaaatgttacctccccaggagcccctttccccagcttcatcactcttagtctcagactcagtttaccaccctcttagggtatctctcaggttgtaattcttttgtttgcaccctgacctgtctcccccatgagggcagggcccttatttcccagctatccacaacaccagtgcaaagcttactgcatacttaatagatgctcaataaatagttgttgaatgaataataaatgcatttccacttttaagataaatccacattaaattgtacattttaaatgggggaattgtatggtatgcaattatatttcaataaagcagttactaaagatttttttttttttttgagacggagtctcactctgtcgcccaggctggagtgcaatggcacaatcttggctcactgcaacctccatctcccaggttcaagtgattctcctgcctcagcctcccaagtagctgggacaacaggcgcatgccactacgctaggttatttttgtatttttagtagagacagggtttcaccatgttgtccaggatggtctcgatctcctgacctcatgttccacccgcctcggcctcccaaagtgctgggattacaggcgtgagccaccgcgcccggccaaagatgtttttaaaaagtaaatccagggtgaggaggacagtcgtggtataccatatgtacctcactatcccacagcacacgcatcctctaacttaatccggtcacactgatctccatcacagtccacatcctgtggctgtccacggagaattgcagttgttcagacttggaagggatcttagaggtcatcccatctcttttgtagcagctttgacaaggtatcctctggcctctgcctgaacatgccaatgatggggagatcactacctaacaagatggcccattccactatgctaacgttaattaaaatggggggttggaacctgtttccctataatgcttgcataatggtcgtagatctgctgcctggtaacacagaaaacgtgcactccaccttccacagccagagaaacacagcaggcagtttcttcctaaaggggctcttctcccagctaaagagacccatttgcctcagctattcttcccctgacatggtcacctcctccaggaagcctttgaagatgtgcctcccccttgtatgtgctcccagggcaccttgtatgagaccctaacactgcccttatcacactgtattaattaaactgtctctcccaaaccctgctttggttacccaactatactgagcgctcctcccccagggtagttctgggccttcattcatttcttttgcctggtaccttgcatggtgaccaactgacctgatctaaaccacttaattaaaaatgtgttgaataaatggtttccaagtgttggattatcccagttacattcctttatactccttttttttttttttttttttctgatggagtcttgctctgtcgcccaggctggagtgcagtggcgcgatctcggctcactgcaagctccgcctcccgggttcacaccattctcctgcctcagcctccccagtagctgggactacaggcgcccaccaccacgcccagctcattttttgtatttttagtagagacagggtttcaccgtgttagccaggatggtctcgatctcctgacctcatgatccacctgccttggcctctcaaagtgctgggattacaggcgtgagccactgtgcctagcacattcctctaaactcttttaggcttttggtatcctccatagaacagaaaaagggacagcacaacctccccccatctctgccctcctctgtgaatgctgcccatccctcagtttttcttcagccttgaactagctttacatagagctgagcgtccttgaaacccccaggtctattttcacgtgatgcactggtgagttcagcctccctatcccagcccccgagtgaatggtagtttcctgcgctgggaggcccagaccgtatgtttgggcttgctggctctcccattctgcttagcctattgaaatcattcagcaggaccacaggtgccagcttagtgccacccacaaagacgtggcttcacctagatacctaggaataacacacccctaaactccaactctgcacgcaggcaaaacactgccgtctattgtgggccttctgtgtgccagatccttcccatgccctttcccactcatttcatcccctactaaccctgaaagtttgctactactctccagattttgaagataaagagggggaggctctggccgggcgcggtggctcacgcctgtaatcccagcactttgggaggccgaggcgggtggatcacgaggtcaggagatcgagaccatcctggctaacacggtgaaaccccatctctactaaaaatacaaaaaaattagctgggcgtggtggcgggtgcctgtagtcccagctactcaggaggctgaggcaggagaatggtgtgaacccggggggcggagctggcagtgagccaagatcgcgccactgcactccagcctgggcgataaaatgagactctgtctcaaacaaacacacaaaaaaaacaaagaaggggaggctctgagaagttaacttacctgcccaaggtcacacagctagaaaggggcagagtggggatttggaccccattggatgactccaaagcatagggtgtctctttcctttataccatggtgcttctaaaggccttatcccaatatgcccagtaacttttttcctacaaaggtggggtgaagaggaagaacaaatgaaaaagctcttcctggtaatggagagctgggggtgtgaggtggtgctagcccttcctggtccaccttccacttgcccagtgagggattcaggccccttaaatattgccctccccactccagaaaatgacgcttagtctaaataaagcctctgagtctccagtttgactattccagctctcactactggccagtcttatccactgtctcctcttcctctgttttgtctgtggatgactcttcagccctagaacagtgcctgacacacagaaagtaacaaagacatattgctggatttgaggaatgaaccaactctcactgtaggtgcaaagagaaatggatcaggcaccttgctctgactgtgtgagtttaggcaagttacttcccctctctgagcttcagtttccttatctctaaaacagggcaattaacaggtaacggtgtagaggatggtgtgacatcatgcctgcaaagtaccccatataatatgtgcccaactaatagtaggggcattattaattaggtgttgctggtcccggctttagagagagggacattgaggctcagagaggtgaaggaacttatgcaaccctcaacattacacagcttggaagaggcccataccgaacagcagctgatgggcctggatttaaggctgtgccctttttcttgctcctggggcctttcccaaatgttcaataagtaacatttctactacaaagataagaggtggttaaaagaattgttcataataataacactaagggccccagctgaagcaaagcctgtaacaaagggactcaggcaaggagcagagaccccggcccagccagcagcttccctgctcggcccacagcccagactggggctaggacgggtggcgtcattctggactcctgggctctaggagggtgggagaggccccaacagtgggtaggcctgtcccaccccacccatcatgggttctttctgcccccactgaaagggcagactctctagtggcttgaacaagtccactgtgacccctccccccacattttgcctcctaaaatagcccagagccaccatgtgcccagggcggctccccactggttgcaaatccccctgaaatcaaatccccatcctgccccaaggaggacggcaccacctcctgccactgctgggctccagcgccagccaggctcccccagtggaaaccgggacagttgtccttcacagtgaccgggacataaatccccaaataatgagacaggcactgggaacacagaaccagacacagtgctaattggtttgcttctgggcagagatgatgtggagacaacagtaacaggcctcagtttccctggcggtgtattggggtggggggatgcaagggccagggatccctggctgggctgattttctacgccttctgactggcctcacaacctactaaccagtcgcactttttaggatattaaattcccagatgtaaaaggaaagggctggggtctcctggtccaggtcctgaggtaggaagcctagaatctctaccatgatccagaaacaccttctttccattaagaaaaaaaaaaaaattcaaccaacactcagatccttcccagtatgcatgggggactgggggagcagggaggcggggaacccagtgcaacctccctgctcctcatgtgaggttggtaatggattcttggacaagcccaaggacctcagtttgcagtaatcaggatgagattatcacattaaactttcaaagtctttgctcaaaaagaagcagcagcagctgacacccttgactcccccgactttcccactgtcaccttctcctggaccatgaccagatgagctccagatacaggccacgtggaggctccactgcactggggcagaggcaggggcatggacaggatgatctccctgggggtggcctcagggttgtggtaagatggaagggggaggaggtgggggagagaggtgagcatgtgtgtctgcgggtgtaatttggagggactgcggggaactggagtaacttgaagtcaggcaaatgtgtttacgttgcaacttcgccactaatcgtgtgactgggaacttgtcccttctcttcacatcttagtttcctgtctgtaaaatggagataatggtaacaacaatgcctaataataactcctctgactcaaggctgatgtctgagaagattaaataagataacagaatatactagcccggcacggtggctcatgcctgtaatctcggcaccttggaaggatggaaggaccaggtgggtggattgcttgagcccaggagtttgagaccagcctgagaaacatgacaaaaccctgtctcgcaaaaaaaaaaaaaaaaatatatatatatatacatatatatatatatacacacatatatgaacaaaaattagctgggcatgctggtgcacacctgtaatcccaactactggggagactgagacgggagattgaggctgcagtgagccatgatcatgccactgcactccagcctgggtgacagtgagactctgtctcaaaaaaaaaaaaaaaaaaaatactgaccaggcacagtggctcacgcctgtaatcccagcactttgggaggctgaggcaggaggatcacttgaggccaggagtttgagactctatctttacaaaaaaaaaaaaaattagttgaccatggtggtgcatgtctgtagtcccagctgctcaggaggctgggacaggaggatcatttgggcccaggagttgaagaccacagtgagctattattgtgatactgcactccagcctgggtgaaagagcaagactgtcttcccccatcaccccccaaaaaaaagaaagaaggaaaatgccctaaaactgtaaaagcccactgcgatgtgagggatgatgtcattagttacagcaggagggatggtgataagaccatagaaagaacttcctcacagccttgcgttggaaactaatggagcaaaaaaaaagaaagaagacaaacaggcttgggtagaatgccaaagatctcatcaatgatccactctcccaacccagggtgcccatccccatgtccaggctcccctcctgcccatcatcttgcctcccaaggctgccaggcagccatcaatttttcccaactcagagctctattcagcttgtatttgttgccaacacaacagaaattatttcaacctcttcatccagcttggcagagctacctggggtgtgtaggagaggccagagctggaagaaaggaggctggaaattggggtgtccaacagtggggtggccgtctctccagaatattagctgcaattgcagcattctagaaggcagtcagcttcctgagaggacagccttatactgccccatggaagggaagggaaagcctgaggatccaggggtcctcacggggaccttggccacctttcctcttacttaaagagctgcattcagaaggtgttgggaaggaaaggccctgactaccagccaggttcaaccctgtggaaattaagatctgtaagtctccctgaccctcccttcatttcctgaagcttttatttagtttgtccagcaggatcctcccatcccagcccactgattcaggccttggggtcctgtcctcctcctcaatatgagaaactaatcctaacccatcctaacctcacaaggatggaggcagattgaggatgacaccaagattccagggtcacctggggtggggaagggagaacctccaagtccattggctgagggagatggtggggtatccatggtccaccttgctggccagggagcagctgctgaccacatcaaagtcctcctctcaaatcggtccggtgggaggaggcacaaagccgttgcaggccatgaagaaggagtcctttcaaaaccagctgagaggttccaagaaacgccctgaggacaggctgtgtcaacatgtcctgtgccccccaggcccactggtgcagcttccaagcagcttcccacagcagggccactcagaggccttggctggaaggcaggggagggtgaaggacagagcatgagctccaggagccatcagaccttgggcaaagtccttacctctctgatctataaaatggactcagtagtatatacctcatggggttgttgggagaaccaagaggtgatatagggatagcgtctccctttgtgcctggcacagagtagggggtcgataaattcactcaataaacacttattgaacacctactatatgccagcctgtccactctataccttgggatctagcagtgaacggaagtccaaagggccctcatggaacttgcaaatctgggttaggggaagaaggatgggcgcagacaataagcagataaacacatgaatcaggatggacgagggcttgcagaagaccagcactcaggaggggcccctctggaggggctctgtcagacctggctgacctgagggataggcctgcctgagggtttttggccacaaccactcacgggaatcacctgagcagccttggaaaattctgatgtccaagctccgccccagggattttatttttttgagacagagtctgactctgtcacccaggctggaatccagtggtgcaatctctgctcactgaaaccttcacctcctgggttcaagtcattctcctgcctcagctgggattacaggtgcctgccaccacgcccagttaatttttatatttttaaagtagagtcggggtttcaccacgttgaccaggctggtctcgaactcctgacctcagtgacctgctcgcctcagccttccaaagtgctgggattacaggcatgagccaccacgcccaacctctacccagagattctgataggcttggtctgggtgcagcctgagactgtaaaattctgcccaggtgattgacatgcagccaacagtgaaagcctcatgcccagcaggcttcccaagtacctggctacaggagcaccacctgaggagcttgtccggcatcctaggctgggctccacccccaggggttcagattcaggagcctggggtgaggcccagcatcaacaggtgcccagattctgaagagtttctaggagagcaagggcgagctccagagactggctctcagagtcttcctcacactgagcctggccacactgcatgggaccacctgctgctcccatgagcactgtcccactgccttgcccccagcctagcaagtcccccgcctttctccaggcaagtcctgctgctgctcctaggcttaccatgaagcctgaagcttcccaccacctcagccccttggctgaagcccctatgccatcctgttccatggcgtgcttcatgtctggctgaatcctgggctcctagaggtaaggccaactcatccatggcacatggcaccaagcccagcacctcacagggtatgactcgtgacctcagtgatccgctcgcctcagccttccaaagtgctgggattacaggcgtgagccaccacgcccgacctcttcccagagattctgatggaataccaaccttctgttgaaggaataccaaatctcttccagcctcccctgctcccacaactaggccaaaggtggcagtgtggtgactggctcctctagatccctactccaccccctcacctgagtctctggtcccaggattcctcttgtggcatctggcttctctcccacccactgcactcttggccttgccctaagagccagccctgggatggcagacagtgtacaattatgtttccccaggcaaaggtgctccaggacgccctttccatcccctctaaagaaccaggtatcagccagtgtggctgttcatgcctgtaatcccagcacttcaggaggctgaggtaggaggattggttgagtctaggagtttgagaccagcctgggcaacataatgagaccctgtctttacaaaaaatacaaaaattagccaggcaaggccaggcgcggtggcttacacctgtaatcccagcactttgggaggccaaggctggtggatcacctgaggtcaagagtttgagaccagcctgttcaacatggtgaagacccgtctctactaaaaatacaaaatttagccaggatggtggtgcacgcctgtaatcccagctactctggaggctgaggcaggagaatggcatgaacccgggaggtggaggttgcagtgagccaagattgcgtcactgcactccagcatgggcaatagaatgaaactccttctcaaaaaaaccaaaacaacaaaaaacagtacctcttgagagacaaagtggcaaatgtaagaaaccatgtctgttcatttttgcttgccagcataatttcacaaagctcctgactcgtgacaaaatgtttttttgttttttttttttgagatggagtctcttgctgtcaccctggctggagtgcagtggcgtgatcccagctcactgcaagctctgccccccgggttcatgccattctcctgcctcagcctccagagtagctgggactacaggcacccgccaacacgcccccgctaattttttgtagttttggtagagacggggtttcaccatgttagttagccaggatggtctcgatctcctaacctcatgatccacccacctcggcctccgaaagtgttgggattacaggcatgagccaccgcgcctggccataacaaaatgttttaaaaaaccaatcacactacaggaggtctttgttttctggtaactggcccaaaaaacaaagattttacattttaccaagaaaatcctgtgttgtctttattaagtttttgattacttaaaaaaaactaaactttaaaagaattaaagtttttacatccatgtaactttctgtattgcttttcaagtctttttttttttttttttttttttttttttgagacagagtctcactctgtcgcccaggctggagtgcaatggtgcgatctcagatcactgcaacctctgcctcccaggttcaagcgattctcctgcctcagcctcccaagtagctgggattacaggcgtccaccaatacaccaggctaatttttatatttttagtagagatggcattttgccatgttgaccaggctgttcttgaactcctgacctcaggtgaacaacctgcctcggcctcccaaagtgccaggatggcaggcgtgagccaccatacccagccacttttaaagccgtttatcactctggttaaataaatattatttgggtgaatgcagtggctcacacctataatcccaccattttaggaggctgagatgggaggtttgcttggggccaggagtcccagactagtctgtgctgaacatatcaagacctcatatctgaaaaaaaaaaaaatagctaggcatggtggcagatgcctgtagtccaacctatgagggcagattgcttgagcccagaagttccaggctgcagtgagctattatcacaccactacactctagcctgggcgacagagcttgtctcaaaaaaaaaaaaaacccaaaaccaaaaacaaacaaaaaactattattttagaatgacctatgattctgttttgatgaagtgttttaaacatttttacatctttggcaggtttctccaagatcaaaatcctaaattaagcctttttaaactaaatagacatataaaagacatcgtcaaataataaataataatagatcttctttcagttacatttatgagtgttattaatataaacgtttcacaattatattagttcataaaaatctaatatattatcaatgataattttattttattttttcttggagacagggtctcactctgttgcccaggctagagtacagtggtatgatcacggctcactgcagcctccacctcctgggctgaaacaatcctcctgcctcaacctcccaagtagctttgactacaggcatacaccaccatgcccagctaatttaaaaaaaaattttttttttagagatggggtcttgctatgtttcctaggctgatcttgaacacctgagctcaagccatcctcccacctcagcctcccagagtgctgggattacaggtgtgagccaccatggctggccagtcataattttaattatgttcaatattttccatattttatacagatatgttatttatataaacaatctaaagactacttaaaatgtataaagatctgggctgggtgcggtggctcatgcctgtaatcccagcactttaggaagccaagacaggcagatcacctgaggccaggagttcgagaccagcctgaccaacatggtgaaaccccgtctctactaaaaatacaaaaattagccaggcgtggtggcgtgcacctgtaatcccagcactttgggaagccaaggcagaaggattgcttgagtccaggagttcaagatcagcctgggcaacatatggagaccctgtctgcaaaacatttttttttgtttttaatttgagacagagtctcactctgttgcccaggctggagtgcacaatgtcggctcactgcaacctccacctcgcaggttcaagcaaatcttgtggctcagcctcctgagcagctgggactacaagtgtgcgccaccacgtccggctaatttttttcttttttttttttttgtatttttagtagagacagggtttcgccatgttgcccaggttggtctcaaatgcctgagttcaggcaatctgcccgcctcagcctcccaaagtgctaggattacaggtgtgagccgccaagctgggcctctgcaaaacatttttttttttttttttttgagacagagtctcactttgtcgcccaggctggagtgcagtggcgcgatctcggctcactgcaacctctgccctctgagttcaagcgattctcccgccttagactccccagtagctgggattacaggcgtctgtctctgcgcctggctaattttttgtgtttttagtagagatgggttttcaccatcttggccaggctggtcttgaactcctgacctcgtgatccacccacctcggcctcccaaagtgctgagattacaggcgtgagccaccacgcccggcctctgcaaaacattttttaaaaattagccaggcatggtggcacacgcatgtggtcctggtcacttgagaagttgaggtgggaggattgcttgagccagggaggttgaggctgcagtgagccatgattgtgccattgcactccagcctgggcagcagagcaagatcttgtctcgaaaaataataacaatacatttaaatttaaatttaaaaaaccggctgggtgcagtggctcacgcctgtaatcccagcacttggggaggccaaggtgggcagatcacctgaggtcaggggttagagaccagcctgcgcaacatggtgaaaccccgtctctacttaaaacacaaaaattagctggatgtggtggcacacccctgtaagcctagctactcgggaggccgaggcacaagaatcgcttcaaccaggcaggcagaggttgcagtgagctgagatcgcttcggcctgggcaacagagtgagactttgtcttaaataaataaataaataaattttaaaaaccaactctaagaccaggcgcagtggctcacgcctgtaatcctagcactttgggaggccaaggcaggcggatcacctgaggtcaggagttcgagaccagcctggccaacatggagaaaccctgtctctactaaaaatacaaaaattagccagccatggtggcgtgcgcctgtcattccagctacttgggaggctgaggcaggagaatagcttgaacccaggaggcagaggctgcagtgagccaagaccccagcattgcactccagcctgggcaacagagtgagattccatctcaaaaaaaaaaaaaaaaaaatccaataaatataaatacagaaagaaaaaagtaaaattaatttaaaaacacaaatgtaagtttgttttattagttatgttttttcccatatgtaactcagtttaatacttttttttttttttttttagatagagttttgctcttgttgcccaggctggagtgcagtggcgtgatcttggctcactgcaacctccacctcccaggttcaagcaattctcctgcctcagcctcccaagtagctgggattacaccaccacgcccggctaattttttgtacttttagtagagacgaggatttctccatattggtcaggctggtcttgaactcccgacctcaggtgatccgcccacctcagcctcccaaggtgctgggattacaggcgtgaggcctgtatacttaagccttaatactattaagcatatactgctatgtatgatctataatatccttgtaatagccctattaaagggttaagtacaaaaaaagacaatgttgatgaaaacctagatcatgctaattaaaaaataaatgcaattcaaactgtgttttccaataagtaggcatatatgcacgctgggactagtgctcattgcttaaaactacaactgaaaacaatcaatcatcctgaaaaaagaggcttcctagttacctgacacaatcagcatttggcttttaaatacaaccaggcagctgatttatgaccaaaagaaaaaacttgtgacacaaagtagcaaacatcagaagccatttgctcatttctgcttaccaggataatttcacaaagtccctgactctgtgcttatctgcagctctctgaaaagagttttaaagacaaaacaagataaaacacagcacctcccacagccccacatctcttgcttgaatcactatattccttaaaagatcaatggccccagtcctagccaggcgcagtgtctcacgtctataaatctcagcactttgggaatccgagacaggaggttcacttgaggccaggagcttaagaccaaccaggggaacatagcaagacccctgtctccataaaaataaaataaccatagtccttgccttttgttgcacatacaataatgtctgacagagttagtgattatacctccgtaatctataaccaatatactgttacagccaaattttgatgtccttttgcacatactgaacccccactacctatatataaactataagctaaaacactgatttaaaacagtctgacaaaactgttttagggctgtaggccatgctctatagtcctccgtaagacttctaaataaaactaactttaattctttaaatggttaattttttttttaatcgacactcttagagggtcgttatgaggattacctgagtcaatatttgcaaagtgtttagcaaccaggcatgtggtaatcattacatatgtttgctaaataacacaagtgtagtcaatcaacaaggtccatcctgctgatgctgggtctgggaggttgggactgagatttccactttacagatgaggagactgaggacccggagaggaagagacttgccctcagatggcactcaaacctgaggtctgtctcccttcaaccttctctcttccagcacccccaggtcacctccctccctcctcaggcgcctggcctggcccgggtgggcgcagtgccccacactgacagaggcccctttgtctccctgcccagtgtcacacccagagggcggagcaccgccggacaagcgccctgtgtctgggtctgtttcaccgccaggtctgcggccgcctgggcggctccagccacgggactcgaggtaggtggatcccagggccattcccatcccttccatcccccaccccaacctcagcagggcatccctgactctccctcagtgcaaagaaggagaaacctccaagggaaacgccccagttcttggtctcgactctgtacaaactccaagtggccagagcctgggtgttggggggaagagctccaagctgcctcaaataccagaagcagggagctaagggtgtgggaatggcagcaagggcattctgcatgttgcaggagggctgcggtgggatcctggggagtgggacagagattaccctgcccttttttaccccatactctatctgtaacccgtcacccaggctggagtgcagtggtgcgatcacagctcactgcaccctcgacctcctggcctcaagcgatcctcccgccttggcctctcaacacactgggactacaggcacacgcatcaccatgcctggcccggttcacttctctttaccacctggattggcagaacagccacctcactggtctccctgcctctacttccccacttcctctccctcccagtcccatcttcacacagccagagggagactattaaaagggcaactctccagcctgggcaactccatctctacaaaaaatacaaaaattagctgggtgtggtggtgcacacctatagtcccagctactcaggaggctgaggtgggaggatagcttgaacctgggaggtcgaggctgcagtgagccgtgatcacaccaccacactccagcctaggggacagaataagaccctgtctctaaataaataaataaataaataaataaaaataaaggcaaatctgatcaagtcatgctctgggataaaagctctaaaggcttcaccctttgctttaggagaatgcttgccccagcctggaagatccgggcctttcccctcccccaagcccttctctcccagtccaccccttccacctgattcctcccacagatcaactgagatataaatacaactctccacctaaaaatattacgggtagaagtaacactgaggatggctagaaatggatataagaaaactcattattgactaaaatgcacaaaagaatcaaatcttgaccacgaatctttttttttggttttaatttaaatcttccaaaatggaatggggttacccagtcaatcacacaatggcagaaactcgtgtcaagagcctgcagcccccacactgatggatgcctccaatctcagcagcagaatgtgtacggaatcgatgccgatgaaaacagtttcagtaaaattacaaaagaatgaaaaacatggacatttgtttaactgtactacaggggaaaaacaaaaatctgatcaaagaattaagttggatgaatagagttcaagctggagaacaccttcttaaaacattttcagggttagtatgttttggtttaaaatgtttgcattcaaaacatccttcgggtcaaaatatccgtagtggttaaaatatcctgtgtccctctgatctgtttcctataactccccaccttccagccacactgggctctttctgtccctggagcacagcgagtttcccctcacttgggagctttctcaaagcctgttctctctgccttgagtgctcttttccttctgacccctccctcctccttctcatggctgatatttaactatcacctctgaaagacgccttcctgcattgctctctctagggtagttttccttccttcccatttcctcttattccctttttttttttttttttttttttttttgagatggagtctcgttctgtcgcccaggctggagtgcaattgcgcgatctcggctcactgcaacctccacctcccaggttcaagcgattctcctgcttcagcctcccgagtagctgggattacaggcttgcgccatcacgcactaatttttgtatttttaattagtgatgggttttcaccatgttggccaggctggtctcgaactcctgaccccaagtgatccacccaccttggtctcccaaagtgctgggattacagacgtgagccaccacacccagcctcttattccctcttgagaacctatcttaggctgggcacggtggctcacgcctgtaatcccagcactttgggaagcagaggcgggcggatcacgaggtcaggagatcgagaccatggtgaaaccccatctctactaaaaatacaaaaaattagctgggcacagtggtgggcacctgtagtcccagctactcgggaggctgaggcaggagaatggcgtgaacccggaaggcggagcttgcagtgagccgagatcctgccactgcactccagcctgggcgacagagcgagactccgtctcaaaaaaaagagaacctatcttgttccctcttggaaccctgtcttgttcctcctgaattcccagggcagaggctagcaagtataacacatagtaggtgctccataaatattggttaaatgaatgagtaaatcagtgtcactgggatgagagctaggacagtaggctggggcttgggggtaggggctgggacagggtagagacacacccacttatgacatcaagttccaaggaagcccatttcagtgggagaacaaagagaagactggctgcgcatggtggcattacaggcatgagcctgtaatcctagcactttgggaggctgaggcaggaggatcgcttgagcccaggagtttgaaaccaatctgggcaacagagggagacccctgtctctacagaaaatgtaacaaaattatccaggtgtgtgcctgtagtcccagctattcgtgaggctctggactgagggctggggtgggaggattgcttgggcctgggaggcggaggctgcggtgagctgttatcgcaccactgtactccagcctgggtggcagagcgagacttcatctcaaacaaaaaagaaaagaggatacaaaaccagtcctgctcctgatttttgccctatgcccagcttcccaagggtcaggcccatgtgccaaatggacagctccccctccaccccttcatctaggccaccttcttggggcttggctcccacgtgtggcttcaggccaggctatttggggaaacttcctgatcccccctctggcctctccacccccacacctcatcttgcagacccagaatagctgtccccagtctcaacctagggagagtctcattcccaattagcacccagagggttgaaaccatctctaaaagcttcttgtgtccctctcccctcaggaagctgctaactaggacagcaaatttcagaataaggtcacaagaatgctacctgcccctatattcacctcccagccagagactcagggaccaggagtcttggtgtgtgaaggtagaggagctttgggtgagggggagattcaggaagagccaggggtgactgcagcctgtgactcttttaatcaaaggagcagctccagcatggtctggcaaggagccctggctgtgaggggtgaggagacccaggttccagtccaggttctgctagaagattgattctgcgaaagttcctttgctctctgagctttcatcatctacaaaaagaactttgatcttagccaggcccagaggttcatgacggtaatcttagcactttgggaggccgaggtgggtggatcacctgagctcaggagttcgagaccagccaggacaacatggcaaaaccctgtctctactaaaaatacaaaaaattagctgggcatggtggcatgtgcctgtaatcccagctactcaggaggctgaggcacgagaatcttgtgaacctgggagggggaggttgcagtgagctgagactgcaccactgcactccagcttgggcaacagagcaagcgagattcgtgtcaaaaaaaaaaaagaattttgatctctgcaggtgctcataggatgggatgaggcagttctgtatactgcaaagttctgtacaaaatcaggggataggaggccctttggggtcctagggagattgttctggagatggattcttacaggggccccgagcccatcagagaattattcctctgctaaagtctcactggaggactggctcaagcctctgccaacagggagagtgggcaggcttctcccacattccaaagaccacaccccatgtgtccctctttaggaacccctagaaaacccaagggttcctgttcccagtgccttttcctggcatttcctctcctctcagcagggagtgggggagtgtcccatccccatcctgccctccagggccagagcactcaactttggggctggggagggggtcagctggcatcagatgcgggactgaacagagctgagatcagaagggtagagaagtctggggcttgggatgtaggagagacatctgggagcggggggcgggggtccggggaaggctggacagggcagggggcaaggccaaagctgggtctggcctctagcctgggcatctaaagtgagaagaaggacctgtggagtcagtccttgccccacccaaggaaatcttaatccaataaacaaacagccaacacagccgctcctgtgcaagaagccgtgggagcgatggggaggccacagaggtggggaggccaggagagggcagggaggctgtttaaacaggcccctcggcctggggcagttggcagaaatatttggaacagggtggggagcacagctgtggtttggagcaggaagctggggcccggggtgggtgggctgagcttgactgcttccaggagaaagaaaagtgtcaattcagccccactctggtcaacgcctcttctgagggagactccaagtcccaacacccttccctcagttcaaggtcaatcaggtcaaccagacagacaaggggctctatcccttatctcccagagtgatgactctggacccccagccctgctcccaggcctatgaccctgggcctcatcactgaagaaagtttcagagttcagagccgaaaccccggagttctcaacagaggagttagaggagatgagccatcagctctttattttttttactttttattttattttatttatttttttttttttgagagagggtctcactctgtcgtccaggctggagtgcagtggcacgatgttggctcactgcaacctgtacctcccaggctcaggcaaatctcctgcttcagtctcccgagtacctgggattaaaggtacccatcaccaagcccggctaattttttgtacttttttagcagagacgaggtttcaccatgttggccaggctgatctctaactccttgacctcaagcaatccacccaccttggcctcccaaagtgctgggattacaggtgtgagccactgcactcggcccatccactctccctaggacgtgatattccctttcctgccgccttgcctggcagtggaggagcccagaagtgatcgtggccccctgggaggcattatcaccttttttttttttttttgagatggagtttcacatttgttgcccaggctggagtgcaatggcgcaatcttggctttctgcaacctctgcctcccaggtacaaacgattctcccacctcaatctcccaagtagctgagattacaggcatgcgccaccgcgcccagctaattttgtatttttagtagagacgggggttcaccatgttggccaggctggtttcgaacttctgacctcaggtgatccacccgcctcagcctcccaaagtgctagtattacaggcgtgagccaccgtgcctggctgtcaccttctttcaggactcttggctctccttttgccgagactcctcaagagactaaggcagagagtcagagggatacatgtccagactgacaggcagatatagagagaggtgaagatacagaaagacccacccagagagatagccacgcagtcagacactgagagtgggagtgtgagagagagggacagagagagaaggggtagacagaggaggcagagaaaaaggaagaagaaaagacatagaaagactcacagaaaaaagagctagacgggtggagaggagagacagagataacaaaggacagggtcaggagaggggaaaggacacagatggggagcacacaggaggcgcagggccagacacactcacaggccgaagcagaaagaggctcacgagaactacacaaggacagacagcctcaggacccagagacactctcctgggagacgtggggggagccaaagtgcttgggggtcgagccccactgggggtggcctcaccagggcaatgctgctgcctcctgtcccaaaagcttaaccaaccgctgccggcatctggcccccagccaccctctagtaagccagcccttggccactggagccagtgggtcacccaaggtgaatgaaaagtcaccaataagggacagtgagagtgtgactggggtgaaggtatgggtgtcacaagccatgtgtgtcagggtgggtctgacctggggtggggtttaggagcgcacaaccctatacacagacctctgggggttagtgcaggcgggcatgcgtacctgagtgagtttgtgagtgtctgtacacgtgtgtggatccagttccattaagagcctcacgatgctaatgaggccaacgtggcaggctgttcctcaaatagcccaatcagaaacaatgagtgagcagagacagccacaataaaggtttcatgcctcttctgaacagacggtgtgtccaggtgccacagggcacttgactacagtcaacaccagcgtaccattcattcccgctggggatgacccccgccgcctggccagctgaccccacagtctcccctgtcccaagcccaaactccaaactcatgggagaacccacatgatagacacatgggccctcccgggtggcaggcgcagctccctctgagaagggcagccagagggatggtggggtccaaccctggctttcccccaggctagcttccatccctcctgctgctgcggccccatttagctctctccttgctcctggggtccagtgacccacaccctcaccacacacaggagagaagtaacctctcctccccagcccttccctctcaagcatcacaggacattaaaaaaaaaattgtcccagttttgtggtggataatgaggtcaggaggcccacaggggaactgcttgttgatgacaactgacaatcttcatttcaccttgaaactccgtcctggtccaggtaagcatgttctaagcccagttttataggggtgctactctactgggggacagggagagtggggaaggaattaaccaaatggcagctgaagtcacaggcccagccaggcccacctggaacactcacagggcctggggcaaggggacaaatggcggcccacagacatatgtctaaatatttaaaagttataaatcaagccagcaaactgtgaaatatgttctaacctctcaccctgacaaatacaccttcattaacaacctggaggaccagatacaaatttggatttatctgcctcctgagctttacacatcagaatgactctgtgcagaggagacagctccactcgcaccctggccaccccccttcctgctgccgggtcctgtctgcaccacaagggactcttgtgcatgtataaggacacccagcctcatgtccttgctccatccacagcccctgcaaatagctgtcccttcactgtccgtaggggtgcacacactattggcataacctgtcctgaggcagacaggcccagggaagaggctggcatgggctgggagccagatggtgaccatctaggcagggacctccagagtcacaggtatggagaatgtggtcttggaggggactcacagtctcatcccctcggccctgctgatgcctcatcccacagggagaggactggcagcaggagggccagagtggagcctttgaaagcccccagcttagggcatgggcactccctcccttgcccaggtttaagggtgctactgaactcagccttccctggcagcctagagatcaggccagggcctgaagctgtcctttcactggaggacagcttggacaatccccaaacaggactttcagtcactcgtattatttatcttcctggaaaaatttagtgcggcttgatcccaactcctggaggtgggagggcagagcagtgatgacaagagggcatttttttcaggttgggtctccaagccagagcttgttccactgaggcacagcccaagtgagctcctgctggtactggtccctgccttgggcgggggcggggggactctctcccctctacagagacaaaaggcaacacaaacaaggtgactaaaagaggaggaggtgaggggccctgggcagcccagagaggtccagagatccaggaaccagcagggggcaggttccccctggtaggggggcatgcagtgaagggcactctttctagccaagcttagctaaaaaaaaaaaaaaaaaaacccttccactcccccctcccctgctcgctctcactccctgcagatcggctttgctgtcccacacatgaggggacactggtactttctgagccctcgccaggctccaggcactgtgctaagcgctctacatgtgtaccctcatttaacccttgcagccactctatgaggtgggttctattattatccccattttacaggtgattaagtgaactcaaagaggttaagaaacttgttcaaggtcacgcagtaggtagaggtgtcagaactcagctctaactgaccccaaagcccccactctttccactagagcacatggcctcccagaagcaagaagctggcacagacccagaagggatgaaggtcggatatgagaacgaacttctgcctctgatggtttgtgtggtgaaatgaggcaatggaatggggaatctagacagacaaggaagcccccctccccccattgtcacccgtgtctgtccaaaggcttgcgatgatctcaggaaggtccctggggtcccagctggacccagacagcaatgtcctgacttccctttgttctataatccagggtcctctgctctacttcaacccagcaccaagacccaaaggctgcctctccttagtggctcagagctctgagcatcacattcaagctgtcagcccaggtcctcctcctccaggaaggcttcctcgaggtcctgggaggcaggacccctttcctacagcccaaatcccaacactgagggtgcaaatgctcccctgtctgcaataaggccacatctgcgatcaccttccccagccggctctgtgacacagacacagaaaagatctactgagttcccagactttccgggttccctaggccatcggggtaatcccctgctcacccccttgtacccagatgtaaataaatgatgcaggtgccctggggctcattagaaaatcccaggccccagctcagctatgcggcggcttttacctcattagcccacggaacagaagcccagtttgggtcaagccatcaccccctagggtggggaagaggctgcccttggatgaggcatggcgcactctcagtcaacgaggttccttactccggacccccgtcctcaccatccccaacctgccccactccagaaagctgcgtgtctaatgcccggctctttcttttccatcctttggagcccgcctggcatcagggataaccagccaggaccctctaactgccccagagttcagtcccgcccagcagatgcccaacgtcggcgctcagagccgagatagggatatcctcactgtcccttggggtcccccaattttgaggcgagaggaccggacaggtggaagaggctgcctcgttctcccgcgctgccctcgaggtcctcggcgtggactagcccgcgtcgccgtcttacctgcggggcagagacggagcccgccgcggccacctgctctcgcctggctgggaacgctgcgtgtggggctggctgggaggggcggggcccggcggggcaggggcggggctgggagggggagccgggccggcccctccctcgaggccccgccggtggggtgcgcgggctcattcaggtgggaagtcccgggagagcatctgagccacagggagggcccggagctcgagttctgaaggctgggaagttaggactccagggggtgcggggggtgggtgggaattccccgcttcagacagcctcgcccagatgccctggagagggtgacttcatataaagacccctcacacgaagaagaaagctcagaaacctctcctggcctgagtccccttccatctgagctcttcgggcctggcagggttgggtgtgagacgggacactcctctaaagtaagggtgccctctccagggctcagctgtgtaggggtttaggccgctgagggggccattaggcaaccagaccatctttatcctcagcccatctccctccctgccacacagcccctcctccgcccccagcgccagcccaggtcccccagctgtcactgtttagccctggaatgacaggcgtcctgactccgtgagtctagccacattcaaggcctttgagcttagcacccctgagcccctgccccctccctctgcccccagtcgctaattttattgacctgtaaaaggcacgttgctggcaggcagtatactaactgaaggcaaagtggggagcggatgggcaactctccccccgggaaggcagctggagatgggacaggagggaggaggaaggagactcctggatccagggccaaggacactttgagaggaggaagaggggggccttgggaaagagaagtacactgtctatgggagatggtagccaaaaagacgggaacgggaatttcagccctcaatcagacaagaggcctacagaaaaaagaaaatgctgggagaagacagggtgcatttctcatctacctggggacagaaccaagaatgtagcaggagggaaggaggttggacggcaggaaggactgccatcctgctctcaaatctctgccctagccccctcccttcctcttgaaggtgtctcctgcctgctgggccttgtactacagaaatagccctttccctgatgaagcaacctagatcttgcctttctttttctttcttgttaaaatgagaacagaaaatttaggcctttgtaattttccccacccccgtgcctacctgagcccacccctcaaaccctggatctcagcctttccccagcctaggggagatgatctgagggttaagggaaggtggagaggggaatatcggggttggaagctattatggggtagggggagcaggaagccctcacactcttgatgggcctcaagtttagactgttgataccctttatgaataaggcttaggagggctattaaagaggagtgtttaaaacttcttttatttttttatttttgagatggagtcttactgtgttgtccaggctgcagtgcagtggcatgatctcggctcactgcaaactccgtctcccaggttcaagtgagtctcctgcctcagcctcctgagtagctggaattacaggggcctgccactatgtgaggctaatttttgtaatttttagtagagatggggtttcaccgaaatggccaggcttgtctccaacccctgaccccaggtgatctgcccacctcggcctcccaaagtgctgggattacaagcgtgagaaaatgcgcctggcctaaaacttttaacactaggtcaggcacagtggctcatacctgtgatcccagcactttgggaggatcacctgagcccagtagttggagatcagcctaggcaacatagtgagaacttgtctgtacactgcccctctaccccccaaaaattaggtgtggtggtatacatctgtagtcccaggtaccagggaggttgaggtggggggattgcttaagcctgggaggttgaggctgaagtgagccatgattgtactacggtactctagcttgggcgacagagcgagtccctgtctcaaaaacaaaataagaacaaaaacaaaaaaaaaaaggccgggcccagtggctcatgcatgtaatcccagtactttaagaggccgaggtgggtggatcacctgagctcaggtgtttgagaccagcctgttgggcaacatggcgaaaccctgtctctaccaaaaatacaaaaattagccaggcatggtggcaggcacctgtaatcccagctacttgggaggctgaggcaggaggatcacttgagccctgaaggcagaggttgcagtgagctgagatcgcgccactgcactccagcctgggcgacagagtgagactgtctcaaaaaagccaaacacttttaacactaaaaattacaaagcaggtcattggatggggaagggtgagaggtatggatttcaatggggaaccaggaaacttttgttgttctttgaaaattccactggaagaaacaggacattttgagggtgatggctatgttcattatcttgatcgtggaggatatgcatgttaaaatgtatccaggccagggatggtggctcacgcttgtaatctcagcactttgggaggctgaggcaggcagatcgcctgaggtcaggagtttgagaactacctggccaacatggtgaaatcccatctctactaaaaatacaagaaattagctgggcatggtggcgggcacctgtaatcccagctacttgggaggctgaggcaggagaatcgcttgaactcaggaggtggaggttgcagtgagccaagatcgtgtgactgtactccagcctgggcaacaagagtgaaactccatgtcaaaaaataaaacaattttaaaaaagtacccaattgcacactatacaagcagtttattttctaccaattatattccaacaaaattaagacaccacacattttctatcccattttttcatttatttttatgaggagcctcaaaaaatagaagtggccttggtagggaaggaatgtcgtgattctgagtacagtatggcaaattcttttgcctcagtttccctaactccatccagtgcatatgaaaatgtctatgtgcgtacaaggtaggtctggactaagctctggccctccggttgttttcccattgcgggagcctaagccagggtgcccaggactcctgtgtggctggtgggcctgatgcccacagctgatgattcaggaaggaggggcctggagtctgctgcagactctcccgccccctacagcccaaaccgggcactgcagcaatgaggtggtcagtccagggagaggtccgacaagttctcggcacaatgctgcaggaagtcaaagtcaggcacggagaagggcacgcgggaccactttttggcctggatccgcccctgaggggtctccagcagcatgctgcggactttgagcactggcagcttcactgacttgtagatcatctgcagaccccagacctggaggtgagacagagagggtagggtctgggtctctggcctcagactgggcttctctcctcaagttggaattccctgaatacagggccttttcctcccacctgagatgtcacagactgtgggctcccttagggaggggctggacctccctcttcagactggaggccatggggtgggactgtctcccgtgtcctagtgagggctccctgagggcctctgaagactggggctgaggactctggggcctgggacgtggcctaagctcttacctccccacagttcctgcagctgatgacacccccaggcttccagtccttgaagactttgttgatgaccacaggatccctggagacattatagtagttcctggagaggaaggggggtggccacagccctcattgaccctcctcagccccggatctcatgccctcctgccggccaagtctctgcctggaccttgggccttcctgctggttaagaggcacagacttcccaggccaggaaatccaatctttggtgagttctacctgtgtggcctccatcgcacgttcccttgtgcccaggttcaagcctcagcatcggttacctggtcttcacagtctccttatgggtctctctgcctccatttttactcccaatcccaagccatccttccaccaactgctagagggatctaaaaatataaatctgccctgacattctgttccttaaaatctatccaagattcctaagaggaacctcctggataaaggctacactttcacacctgacctttcaaatcttccacgggctagtctgtctttttctaaatctcattattcacagtcccttccactcaggtcaactggtgtcgcttttttttttttaaaggcagagtctcactctattgcccaggctggagtgcagtggtgcgatcttggcttgcctcccgggttcaagtgattctcatgcctcagccacccaagtagctgggattacaagcatgggccaccacgcccagctaatttttgtatttttttttagtagagaaggggtttcaatatgttggccagactggtcttgaactcctaacctcaagtgatctacccacctccgcctcccaaagtgttggaattacaggcgtgagccactgcacctggccctccatggttaccttctcattcgctcacattcaaaccagacccattgagacctagctgaaatgcaacctcctcaattgagaaaatctgtgtgaagatccttggcacagtggcccggaacacagagggtaacataatgaatggatggaggatgggggaaggttactctctaggagatagtggatggaggatggcccagggatggccaagctctcttgatatcttcggaataggtaggaccagagggtcaatgtgtggtcttttgacacttagtatcctgaattccagttcttgctcaaccagatagtggctgtgggaacttgggcaagtcacatagcctctctgagcctctatttccttgcctgtaaaatggagacagggataaaacctgtctaaccagattattgtgaaaatgcaaagtacttgctacaatgctctttagcttcccaaagcttcaaagcactgtctggatgggaaggattcccaggcccccatcccagtagccccttccacaggtctcacgagaagttggggttcacattgacatggtgggtgccctccaccttccgcaggtcgctgccatggcccacagccaccatgcagttgatgcagagtagctgcacgtgctccactgggaactgctgccgctggttctcccgctgggctgcctgggccgcccgcttggtcaaggctgcctgctgcagatcccggatctggggtgggaggagacaccaggcatggctggggcctaagagaacgttccttgggggacaaaaggttcccaaagaactaagatcatttgtacctggaagagactttccttaaccctccctggagcttaaaagaagctctattgctgtgatgatgcagtaactcatgcctgtaatcccagcattttgggaggccaaggcgggtggatcacgaggtcaggagttcgagaccagcctgggcaacatggtgaaaccccatctctactgaaaatacaaaattagccgggcatggtggcgcatgcctgtaatcccagctactcgggaggctgaggcaagagaattgcttgagcccaggaggtggagattgtgccatgcactccagcctgggtgacagagtgagactccgtctcggggaaaaaaaaaaaaacagctatggagaaaaacagtatgagtagtcgggggcaacagtgggaggggtaagctttcctgctcaatcttgaaggactttaggcaaagctgcttctgtgaatctgtcatggggcatcattaacaattatgctgggacaacagggagcaccctggacaaggcaggatggtggtggccctgcctcaggggaactgatgatataagtcctagttctgggcttatcttctgcacgtggacttatcttgtcccctctgcctggttccagaaaggctgtaatgcagctcttccagatacataaagtatctcatggcaaagataaataaagagccttggacaaggcctgttcccaaggccttctggagtccaggtactgccttccctggcagccccaccccggcccttatttaaaccttccctaggtggccaaagttagccccgagatgtagaggggacagggggacgtatgtgtgcagtcagaaacctgccagggaggggctccctcctccccatccctcccacagggcatgcaggctgcctgcagaccttggcctggtactcggcctggtccattttctgcacagcagccactgcctgctccatcagcgtctccagcgcctcgttgatcagctcccgcttcagctcccggctaccttcagttgctacaaacgcgtatacactctgatcggcccgggcacggcccctggcctgggaagagagacaaggggtgtcctgagttgggctggggccccacacaggatcctataagggcggctgagtggaggaggatgtgagtacctggaccatggagatttcattggtcaagagcccataacgcaccaccacattgcaatgtgggatgtccagcccctcctccgccacactcgtggccaccagaaggttcagggttccatcttggaacttctggatcacttcttgctggtccctctgcaggcggagggcagggaggagaaagaggctggtacatgaggaggctcagactgactccacctgccagagtagcctcttctggttcagccctcactcccaatcttggtccatctccctagagtacttgaatcccatctttatccccaggtacccccaggatcttgcccatcttcccaggtaactgtccaacccctatcttccctagggactcctaagggtccctgcccctctagtctaggaaaaactctcaagccatagtcttctgcaagggaccccagacctgatcctgtgccctgaggaactgcatcacccacctctttccctacggacccccatgcccaaccttctgcccccaaggacctccagactgggagaggctccagcactggggaggtcagtgtccgcccctctcccctagctccttgcccctctgcctggggatagtcaactttctctttccccagggtctccctgcccccacctctctgtgctgaagaccctgttccccgcacttctctcctatggaatccctcccagcgccagcatctttccccgaagcccacacctgggtcatgtgggtgctctggctgctgttcccagccccaatcagtagctgggcccggatgtccacagtctgcaggccctgctgctgctggagccagagcaggagggagtgtgcgctttggcgggtgcgggtgaagatgataccccgagggctgttagagctactgaactgcctttgcaggatcttttccagcatctccagttttggattctctgggccatgagttgccaagtgggccagctcattcttgcggtctgtcaaaaaccccaaaatttagctgggtgtagtggcacatgtctgtagtcccagatacttgggaggctgagggcagaaggatcgcttaagcctaggaggtcaaggctgaagagagctatgattgcaccactgcactccaggctgtgtaacagagtgagactctgtctgggaaaaaaaaaaagaaagcaagaaagcaagagaaagagagagagagaaagagagaaggaaagaaagggagggagggaaagaaagaaaaaaaggaaaagaaagagagagagaaagagagaaggaaagaagggaaggagggaaggaagggagggagggagggaaagaaagaaagagaaagaagaaaagccccagaggcagaggattcagatcttggagtggggagggcactggcggaggaggttctcacagcaataggactgtaggcgtgcagaaggtggggggtggggggtgggggaaggatggaactcctgctcaactcccccacagcagcaccaagaacatatttaaggatgccctggccgggtgcattggctcacgcctgtaatcccagcactttgggagggtgaggtgagcggatcacctgaggtcaggagttcgagaccagcctgacaaatatggtgaaaccccgtctctactaaaaatacaaaaaaattagctgggcgtggtgatgcacacttgtagtcccagctactcgggaggctgaggcaggagaatcacttgaacccaggagggggaggttgtagtgagctgggatggtgccattgcactccagcctgggcgacagagcgagactccctctcaaaaaaacaaaaacaaaaacaaaaaaggatgcctcctaccgagcccactctcaaggccagcctcacaccggggtcatacagtacagaacctcagaccagaaccctcttctccccagtgaccaggatgacccttgagcttttaactctgacctctgctacccagatctcttgagccccagcctgtgctgcgatttgcaaccttaaatttcaccctctgactttcagcttcactctctcagtctaaaggaaccactcctagctaatccttttaaaaaatctgggccgggcacagtggctcacacctgtaatcccagcactttgggaggcagaggcaggaggatcacttgagcccaggagttagagatcagcctgggcaacaaagcaagactccgcctcttcaaaaaaaattttttttaattagctgggagtggtggtgcccacctgtacgcctagctacttgggaagctgaagggtgagaattacttgagcccattaggtcgaggttgcagtgagctatgattgcacaactgtcctccagcctgggtgacagagcaagaccccgactattaaaaaaaaaaaaaaagtcaacaatgttaattaattttaacaactaagcaaaaaccttcacaaatgaggaaataaatcagtcctacccatggccttggattttggttagaaaaataggatctccaccagtatcctcacgggcaccttcccatccgaccttggcgcctgtgccctggcctctgacctcgcatccaggtcccatcatccccggccccgaagccccctcccgcccctcaccatcgaacagggccagcagccggcgctcggcacacaggatctgggttttagtgacgtgctccctgtgatagaaatcctgcagcgcagccaaggcatccacggcgcggacggtgtcatggatgagcagcgcgtcattgtagcgcctcaggtgaagcgcatacacccgttgctcctgaagcccagccaaagccgctgcgggaagagggcgcagggtctgagcagcccacagccccgccccctgccctgccccatagggccgtcccactcgactccacccctggggtggataggccccgccccaaaggcctccgccccggcaggccccgcccctgaccactcccacatcctcgcctccgccagaagggctgcccctctcaccagcctcactcagcttcaccacctgctgctcatacatttgcgtcccaaatttccggctcaactcaggcatctccaggtggtcatggatttggtccatgagcttcttcagcaagtccccaaacggatcctgagcaagaggagagttggaggggattcccatacacgttggaggatgggcacccagtgggggtgctgaccccggcgtgtagcacaccgcgactgcctcacccatctgtcttagctgtggtgtgagctccagagggaggccggctagggtgtgggggagtcctgccctgtctcacccgcgatgtgctcttaccctttggcctgggcacggtgatgcctagtgtaaggcacatggacgtgctttggtcaaggaataggccgaggcggacatccgggccagagtgactcagcgagtttggggggcaggcacgtactccacttgctatataacctgtttgtgtaagttcatactggactctactgtcagtagaaggtaaaactgccctgctgacgctgttcacggagcttggttcagctcggcacggcagggcacgcttgctcgcccagagagagaataatgctactaacccctgcaagggacagccggtcgccttgaaggtgggcagtggggagccaggaacccgcttgtgcccagagggaaagagttaagctgctgaccctgacagagctggccttgccggccagggagagcagctgcaggcgtgggggcagcaggagccacagggccggagcagacagcccagataaaggtggacagtgtgagagagccgctgctgaataaaactacatttcacctgcctatggccccccaagggttctttcagctatctgctcactcactccctccctccagaccacagcatgggctcaaacctgaccccaagtgtaacatttggtatagttatggacctgacacctagtccttgtccagtccagtcatggcagacacgaggccgtgtccacactagagagggctcagtagagcctcagcacaaagtatccctgctctctggtttgtagtgcactccccagcatgacagtgatgtgacagacaccagtggtgccttctgagtcaatccaaagagcgggctgtgggcatgggctgtatctgccccatttcacagaaaggagaaattgaggcttggatacatagcaagtgacctgaagtcacagagctagtgagggcagagtcagggcccaagcctaggtgtcctaacttcacaccggctcccgctctcgccgtgtccctgcccccgcgtacctggctgcgcctgtggcagaggttgtactgtttgcaaggctgttggctgtgctcctgcagctgggggcagcagttctggggtgacatgatgcaccacgtgtccaagttggcacagagctgggggcaacagaggactttactggaaagggagggtctgtggggacaatggtcaaagatttggggcaggatggatcccagctgaggacaggagaatgtgggcattcgtctactcaaatattgctcgccctctctgtgcccgtcttgttctaggcactggggatacaaaggaactcagattggagttggagaggcagataataaaccagtaaaagaataatagaaccggccaggcatggtggctcacacctgtaatcccagcactttgggaggccaaggcgggcgggtcacctgaggtcaggagtttgagacagcctggccaacgtggtgaaaccccacctctactaaaaatacaaaaattagccaggcatggtggcacgcgcctgtagtctcagctactcgggaggctgagacagaagaatcacttgaacccgggaggtggaggttgcagtgagccaagatcgtgccactgcactccagcctgggtaacagagactccgtctcaaaaaaaaaaaaagaggctgggcacagtggctcacgcctgtaatcccagcactatgggaggccaaggcaggtgaatcacgaggtcaggagttcgagaccagcatggccaacacggtgaaaccccgtctctactaaaaatacaaaaaattagctgggcatagtggtgggtgcctgtaatcccagctactcgggaggctgaggcaggagaatcgcttgaacctgggaggcggaggttgcagggagccgaaatcatgccactgccctccagcctgggcgacagagtgagactccatctcaaaaaaaaaaaaaaaaaagaaaacaataaaaccttgcagagcgcattaacaagctctgaagaggatagcactggatgatatgacagagagcagagatcagggaggactttcaagaggtggcattaagctgttcaatgaatgacaaggaggaggcagcaggaaaagttcaaagggaagcgcattctaggcaaaagaaatggtaaatgcaaaggtccccgagatggaacaagccctacatgttcaacatgcagaaggcaggccagtgtaactgtaggatgagctacaacagggagggcgcaggaaatgaggtggagaggtagatcacgtggaactttgtaaaccacagtagagtcgggagttaattctttgtaccataagaaaccattggaggctgggtcttaggtgaggaaggggccagaccctgccatggagagcctggtagggctggtggggacggggtagtggcagggcaggcagggagggagggaagtccctggtgggtctggcagtgggaggcccacaggggccaggctgacctgcaggacgtggttgatggccccatcgagtttggaggccccgccagtgcctggggaggctgtgagacccagcacctggggtagcggctgtgccctctggagtttaagttctaggtactggctcatgatgacgttgtagacggtgtccttgtgcgtgtggtggcactcatccaccacgatcagggagaagactgagggcacaggggggaaggctgtgacctatgtttgcaaagcccttcctcccatcagctttcaagtagtccccacaatgatgtaagaattccttcttcccttcacaacctgcagctggtcccaggatgaggagccaggcagggaagacttctttccatttcacagattagtaaaccgaggctcagctggggaagggactggcctaagatcctacacgatagcccggcctgtttctactagagtgcctgcaggggttttgtgaacaggcaacccctcactcccactaaaactcccaacaccttgactccaggaggtgccctggggttggcgaaaggaggtaccccagatgcgtatctttttcctcccggccatggccctcaccagtgagctccacgtgctcctcctcctcggggctggtcagtgccatctgcagaagctctgctgtgcagatgagcaggtcatggcaccgggccaggtggccaaagccagcacgtggtcccatgtccccactcagggttgtcacggtccagcgtccatccagcatgcgcctgaactcttcaccatgctgggtcaccaggtgcacctgggggtggagaatgagctgggaaaagagagctgaatctggggccaggggtagggaggcggtaaggtgacccgcaggacatggctgggtactgagccagggtggaaagacaggtgagcttagcgatggccacagcagctttggagttctggtggggactgggagatgcctgaagagctaagaccctgcttggtggtgggagagcggggtagggacagaccactcaccctgttgaccaatacaaccaccttggctccatccacagtctctaggtgccgcttggccacataagcagccgcccgggtcttcccggcacccgtgggcagccagatgatgatattcttgccctccagggcaggcatgatcacctcccattggtaggaccgaagctccattctgggaatggcaggggactcagacccaccgactcctccacccctcccaactcctggccagaccagtcagtacagagacctccctttgcccaggactccaccccacttgagggaggtggggcaggactccctcagaacccatcaggaccctgctctgcccaaaagggggaggcgggagtaacacaggctacacctgccccctgcccagcccaggactcacctgctctagtaggtaggtctgcccagggcagtcccacttaactcagcctggtgccactctgctcagctcagagacccaagatggaaactgaaactgagggaaggagccagctgagccgacttaggaatctcccatccccgccccaggaaaaagaaccaagagaaaagaaccgtttgtgctaacagtcatcgccaactgccgtgagtacaaactccggttaagtactgctgctgcgccagcgccctggcaggcatgatcacctcccattggtagggccacagctccattctgggaatggcaggggactcagacccactgggccctccactcatcccaactcctggccagagcagtcggtacagagacctccctttgcccaggactccaccccacttgagggaggtggggggggggacaccctcaaaactcatcagaagcctgctgtggccaaaaggtgggggtgggggggggtgggagtaacacaggctacacctgcgccttgcccagcctgggtctcgcctgcaccaccacgtaggcctgcccaaggcggccctgcttagctcagcctggtgccgctgtgctcagcgcagagagcagaaatcagaaatggaaactgaaactgaggggaggagccagctgagccgacttacgaatctcctatccctgccccaagaaaaagaaccacgtgtgctaacagggaagcactctttcagtgctacaggatcctctacgctctggcccttctgcagtcagttgtaaccacatccacccaggttaaggtgaaggcaggaggttctgacccctgctgccctggcatctggatcaggagcagcctggaggagggagaggtggggggctgcaggcaggtaggacccatcaccccaggagcacaggaccaggcctgaggcttgctggggagagcagcctccagtttgcaagaggtccctgggggccaaggtgagcctgctaaggctgggactacaccaaagaaacaatcacacagagaaataaaaagctttattattccctctaagggattaatgccagggaatgaatggtccccataccccccacccctgggggagactgacagaacagtgctggacaaggcatggcccccttcagtttgggctgaacttccaacccctgaagccatcactcaagctaaaatgagcagttctggtcctcagggaaacagccacctgggccaggcccaggaatccaagcctccaaagctcttggggaccaggcctgggggccaccacggctgggcaaggttcatccctggccaccagctactctagaggggctgggccccaacccaggagacctctcacacacagtgaaggctgggacagagctgcacgcttgggggtgcctgaaggtccagaaagagctgcaggatcgggtccggaggacccttggctggagtgtctcaagctgagtcgggtccgtggggccagggcaccccctaaggatcagatcagaatccgaggtggagacattccaggtcagggctgcggcccaaagatgggcctacttgtcaatgaggcctccctccttgagcttgaagtagaagaacttctccagggcgctggcacagcggcagtactcgctgtccggggggttgtactcgcgacagttggcgatgacccgctgcaggtcggccacaaagagcttccgggtcacgtagtagcggcttcgcagccgctcagtcatggtcttcaggtctggggcagcaggagacggagcacagctttaagaggctgaagaccacggcagggctgtccaccagggtgggccccctggggctgcagggcgcagtgagggcaggagcaggtgtggggacagaagaggagggaaggggatggaatggaaggtcctcaccaatggggaagcggatgacctcgtagtagtcaggggcctccgacttcttcacaggctccatgaagggccaggcactggggtgagactggagagaagagccgggctggggacagccctgctgcgcccacgccagcccgagaccactacccaccccacactgcatcaagaggccacagccattggtgcaggggccctggaaaggaaacctggtctccccaccttgatttgggccagcaggtttttgagggttgtgtagagctggtcggggtccttcagctccttcctggggcgagagacaccaagtctgaggctccaagtccctctgccccacccccaacccggctcctttgacactcaccccttctccttccccaatggcttccagcctgtctctcctgcaaagtgggaagtgggagaatgtctctaagaatgccagtccacaccccaagcatcgtgcccccactaccctgcaactgagacccctgcttacgaatgccaggaacgctctccacagggatctgcctcacgccctccttgaagcagctgagccccgggtagaccttgcggatctgggcctgtttgcgctcaatcagcttcttgatgatctgagggaaggaagggactgaggggccaactccagccccaacaacaacccctcccagggccacagtcggagccactggctgcacccacccagctgcaacgccacctaatccagcacctcccctcataacttccccaagggagcagagcaagagccaagatcctggcctgcccctcctcactcacacacatatatgcatgtagacgtagaacaggtctacacacgtgtgctcgccctctgcatgcccattcatgaaaaatcccacagatgcgcatgtgtgcacaccacctctttctgcttcttgatgatgtgggacagctccgtgtaggggatgcggggattcagctcacactccatcagcgtcgctccctcgtagtccttgatgtagcccaggtagcggctcttgggcaccttgatgtccttggagaaaccctggggggtggatggtcatgacccagtccatccataagtatttcccaacttctgtcgtccctcacctgggagcaccagaggagtagcacgtgccacttgccacctcctgctcctgaacctcctcctggggcactgtgagggttcaaactgtccctggaaaggtcccaggtcagctgcccactcctgactcatcccgaagagtcccccagttcctccagcctgctctactggccccccagttcctctagcctcctctactggccccccagttcctccagcctcctctactggccccccagttcctccagcctgctcttggcccccagttcctccagcttgctctactggccccccagttcctccagcctgctctactagccccccagttcctccagcctgctctagtgccccccccagttcctccggcctgctttactggccccctagttcctccaggatgctctactgacccccagttcctccggcctgctctactggccccacaggccctcattctcccctggggcaatggcagcagaggaaagaagataggcatggagactctcctggcaggtgtcaggtgaagtaggggacgcaaagggactcctactccatccacagaggggctggacagaattaccccagcctccaggcaaaggaccggtgtgggacgaggctacgggtcacctgctttttgaagtagccgatggcgtactcgtcggcgtaggtgaggaagtagagaatgttgtgcttgatgtgatactccttcaggtggttcatcaggtgggtcccataaccctgcgggggagggaagcaggactcaccaggagctgaggatgggcctggtgctggagaggtctcagagaccagagaagagcgggtagattggaaaggaggtagagagagcgagagcatccaggcaaagaggaagaaaggcagctgacagaggaaggggagcttatggggagaaagtgaagggtgcgggctttctaagctcactctgggctaggtgcagtgcttcctgttttacagaccgattctcaaattaaccccagaggcgagtattaccacctttattttacagaagagaaaaccgaaactcagctacgttaggaaatgtgttcaaggtcaggctgccagccgtggcagggccgggtccaaacccaacacaggccactgattcccagtccctgggcctcagagttgggagaagcgggagagggagtcaccagaggtctgagcagcaggagcaatgcctcccacacgtcagggccaatgaggcaccacacagatctgaggtatgcgacacacagagccagagaccctacgagtgggtctgttgtaacaaaggacagaagccaaaactatcagcatagggctactgtaataatgattagtttggctgggcgcggtggctcatgcctgtaatcccagcactttgggaggccgaggtgggtgaatcacttaaggtcaggagttagagaccagcctgggtgaaaccctgcaacatggtgaaaccctgtctctactaaaatacaaaagttagccagacgtagtggtgcatgcctgtggtcccagctacttgggaggccgaggcaggagtatcacttgaacctgggaggttgaggctgcagtgagccctgatcatgcctctgcactgcggcctgggtgagagagaccctctttcaaaaaaataaataaaaaataaaaagtaaagtaattaattcccccatgtatgtaaatgttcttgtgatgcagaaaacccaagtccacaggtccaccaaagtgtggctgctgcttgggctccgtctgtcaacaggtggtttcctaatccacagttatcaaagtacggctgccaccttgtggggatgtgaggaacgggccgctaactaagagaagagcaacgggctgctgcatgccacacatcctgctgctccgaactggcccaaactcaggagtgggccgtggactggggctggggccggggagccgcgctcaccttgacctgctcattcgaggtgacagcacagaagacaatctccgtgaagccctgggtgggaaacatgcggaagcagatgccaccgatgacccgcccatccttgatcaaggccagagtcttgtgcttcctaagagagaggggggcatgtcatagcccctgactgtccccttcaggtccccagagccctggaagtctgagctgtagtcagggttgggcagtgagaagtaagaatgctcaaaggatgaacctcagaagtggggagcaggggatccccaattttgaggagtgaagaggccgaggaggaagggaactgggtgtgctgccctgggggaggggctctctgggggacgcacgggtcaaagacgaggcgggcgatatactccttaggcatgcgcggcagctggtgggaaaagacattctgcagccccacgagccacagcaacacccgccggttggccttgggcgtcagtgagttgccgatgacatggaactcgatgatgccgcggcgctcctccaggcgggctgtctcatcccgggccgcattggccgaaagcaggctcgtctgggcacagaagaggggtggtgagccggggtctcaggttggtgggggtcccccaactggtcagcaggtcgggctgcccacctcaggccccagcatggcagcagggtcagtgatggtcagcatgacctcattgaccagctccatggggatgtcacccatcacacggagccgcttggcatcctccagggtcaggttctctgggagcgtcctcttctcgcctattggggaggcaggcaaggttgctcaggatcagtaaaaaaggtttgggaaggagtgaatgagggtcagaggtcaggggtcaagtatccacctggcataggctcggcccctgcagaatccagactcagggagctgttgctgcccccacccatgctggggctgaagatgggggtgctgggaacaaccgctgcactgactgaagctgaggagagagagagacgtcagggatggggggctgaagctgaggagagagagagagaagtcagggacgggggctgaagctgaggagagagagagtcagggacgggggtgctgaagctgaggagagagagagagaaggcagggactgggggggctgaagccggtggcaggtccctcagtgggatccagggcctccggcccaggtgagctctcttccacccaggaggcttagctcagccaggcaggccagacaccctacagagcgtaccatggcacatacctggccggggaaccagctgtgtcccctctgagggtggcatggtgaagcctgactcccagattggagagtttgccccatagatctcctcctccagcatggacaggaatctgtagggaggacacagtctgtcccacaactctgttctccagggtgcagcctgggccaggcagcagagggactggaggctggtcagagacagaccctgctcttagggaactggggacctgagagaggggacagcccctgtcttctgggagcctccaattgaaggtaagaggacaggacacatccaggacagagatcaaacaggctcagtttcaccacgctgtgtggcacagggagacaggtctgagctgatgtcatcctgtgctgtgtggccaggcagggcaccttgtcaccctgagccccctcactgccctcagtatcaaaatgggctcagactccaccccaccttgccatctcttgttcccacctgatggcagggggcactagagagccaggattagtcagtcagggttttttgaacaggggagttatggcctagattttaaaaggtgtggccgaacagaagaaaatggtacagaaaagaccagaacaggagtagaaattggtttcacttcaagcttaaggtctggtttcttggagagttgtgcagggaaggagtctgaggctgtgtccaggcccccatgggaaacaattagtaacatctactggggcgtagggtcgggtgggggcagcgttagcttgggctatgtacctgccatccccagactagtactagcaagttgcttctgggccatgggcaagtctgccaggtagacgcccagatcccaaaaggcccatggagggagaggagggaccaatccaggaagccttcctggaaaaaaggggacaacagggaggatgtgaacttggggccaaatcctggtaggccagaaggagccttacttggggaagtgagtgaggatgagggtcctcttctcgggcaccaatttgtccttctccactcggaacttttccagcagctgccggcgggtaacggtgaaaatggaccggagaaggcttcgcccaaagacatgagtggtttcgtagcgggggaggctatcacagctctggggcacgtggcagtaacagagccatctggagtagggggtcgagggggagacaggtgagggcggaaaccactgaacccaggctgggcctgcaagcctcccccgaagctgcccctggctgggcctacctggtgtaattgaccttgtaggtagccacgtcctcagcctgagacctctgccgaaactgggcaggtgtctcaagcttccagtagttaaggcagagcaagaacatctttgagagctcgaacatcgtctgccgctcccggggagccaggtgactaaacttgtactgcacaaagttcagcacaccctgagaaggggtgggtgggggataaaaccaggaatgaggtgtgagcagcccgcagggccttcttagacaaaggaagatgctccctggccagggacaaggttctccttctcctctctctctcgggtgctctctatagaaaagctctgccccctccctaccaccatgcccaccctgaggttagcacaaaacacccttccttctctgaacctccccagtgttctcagcttgaggagaatggagaacacaggctccccactcctccaagctgtccccaattctcctatccgctatctccaattcccctatctcacctgctcaatattaggtttctcaaatggagggctgcccagggacccctccaccacaggccgggtcatctgcaggatgcatttccgcagtagctagagagaagaggaagggggcatagaggggaggggggcagagctgcagacaacccctcaaggccccacctccttcactcacaccctcctttagtggaagctcaccttgaagaggtagaaatagacctgcttggtgtctgtgtcctcttccttgtgaacagacatgaagagattctccacatccaccaccatccccagcagtcggtttatctcatcctctgacacattctccaagtgggatacgtggtcagctgcaagacagatggcagagttaggaaaaattgatagaagaaatcaacaaggcttcttgaccctcttcacagccaagcaagatacacactctgttcctccaaccagtgtgaccaacagtgagactgactgctccgatatcaaccgttgggttgcctgggcctgttctgggctgagagatttcctttctccccccttggtgcacacccccccccaacccaatccctccttcgaggcatctttgattttttcagagatgaagctttgtggcacttgtcaccctgtccaagcaggacccagcacctgcccccagctccaagggcgctgcctgccttacccaaggggtgctcacaactgcggcacagctcactcaggttggcagctggctgctgcagatccatgcggggtgcagtggggggcttggggtttttccagccattacacttacaggtttcattggcctggaggtggaaggatcagtcaatgacctatacctctggggcaagagccgctccgcagccagagctttgaccccattcccaccagagccctgggatgccccaagccccgccccttcaccccaggccccgcccccaccttgcaagccgagaagacccctagcttctcaagcttcttggcgcgcggcagcccccggacttgcgccttcctctgactggcgcgctgctgctggctcaggccaggtcgagccggatcccccccgctcccggcccccccacttcctaccccgggccccccagtccctgtgctgccggctggggctgcagctggggcaggggctggtgccggggtgggagtcggaatcggggctgaagccgggctgggtgcaggagtcggagttggggcaggggctggggactgaaggggccggggctgcgcagccggggccggggtcggggcctgggaaggttccgccatggcctcccccgcagcggagagcggcgccgcgctcccagccctagggccgcatgggcaaccagcgctcagtgcgcaggcgttgctgcgcggcgcatgacgggagttgtagtcttcccgcgccttcccctcactgcctccagcttccagacttttctgtcctgtctcttggcccctgacagccaagtgaggcctgagtgaaggccccacattgacccctcttcacttgtaatctcttttaatggagtccgggagagtcacgatggctgtcctcttggggacaaggagtcttggggagaatcgtggggtctgcctctttcacgcgcctgtctcccacttaaccccctcccccaactcccgcacaggccctgccccacgcggctccggacacggaattgcagctgcggtagagatgagatgtagcaacagttctgcagtagtgtggtggtgacttgggtgtgttctcctcctgacattcacctgcacctttttctgcgcttttcagtatgtatgtatttaatagtatcactcaacaaaaaggagtttatcaggccgggtggctggctcacgcgggaggagagcttgagccctgcaggagttcgagaccaggctgggcaacattgggagaccccccccaccaatctctacaaaaaaataaaaaataaagtttataggctgggcgaggtggctcacgcctgtaatctcagcactttgggaggccgagatgggaggatcgcttgagcccaggagttcgagattaacctgggcaacataatgataccctgtctcttaaaaaaaaaaaattatcaaataacagcaccagaggcatagctgtggttatgatggtcaccaagaaggctactgacgtggagggtgaggcggaggagggctaggtctttctctgtgcactgggagccactctcctgaagccccaactgcgtcttcatctttgtggccccagagcccagaccacagcctgcagcacaggacgccccgggaagaattaatgcagccggagagaccagtccacctcctcgtgtcgcgtgtccgcgtggggttgtgggtggtcagggagaggtagggtggatgacccaggaaggccgccctcccctggctctgtctaggaacaatccttgccccaggcctggtccttagaaggcaagacagcccccttccagctgggggatcaatctgctgttggctgcgccagggtgcggctccctcgggtctggcctggtcgtggatccagttccttcacagctgcggcctccccgggtccattaacgaaggtggggaagggcggagaaagggtcggagtctgggaggagagcagctgcgggcgcgccagggcgctgacagtctggctcttggaggtaagatgggcgtggctgatcccgaactccgcctgcgtttgcagaagcgaagggaaccgagcgagcggagctgagctcgggtaggccgcgcgaggtccctcctctccgggcgtccgtgcgcctagctctgcgctgggagcctcgcgccctttgacagcagttagttgctgactcggatgcagagagtcggtaacaccttctccaacgagagccgggtggcatcccggtgtcccagcgtgggccttgctgaacggaaccgggtggccacaatgccggtgcggctgctcagggacagtccagcggctcaggaggacaatgaccatgccagagacggtttccaaatgaagctggatgcccacggcttcgccccggaggaactggtggtgcaggtggatggccaatggctgatggtgaccggacagcagcaactggacgtcagggacccggaaagggtcagttaccgcatgtcacagaaggtgcaccggaaaatgctcccgtccaacctgagtcctaccgccatgacctgctgcctgaccccctccgggcagctgtgggtcagaggccagtgtgtggcgctggccctccctgaagcccaaacaggaccgtccccgagactcgggagcctcggctctaaggcttccaacctgacccggtaaacaaacgacgcgatgtgcagcagccttggtgtccgttgtcttttctggggatggaagtcagaggtagagggactggaggcacaggaggcaggaaaggcaccctcaaggtggtggtccaccaagaatcaggcctctgcgggcagatcacttgaggccaggagttcgagaccagcctggccaacatggtgaaaccccatctctactaaaaacacaaaaattaggcgtggtggtgtgtgcttgtaatcccagctgctcgggaggctgagcaagagaatcgtttgaacctgggaggtggagggaggttgcagtgagccaagatcctgccactgcactccagcctgggccacagagtgagactctgtctcaaaaaaaaaaaaaaaaaaaaaaaaaaaaaatgctgggcgcggtggctcacgcctgtaatcccagcactttgggaggccgaggcgggcgaatcacaaggtcaggagatcgagaccatcctggctaacacggtaaaaccccgtctctactaaaaatacaaaaaaattagccgggcgtggtggtgggcgcccgtagtcccagctactcgggaggctgaggcaggagaatggcgtgaacccgggaggcagagcttgcagtgagccgagatcgtgccactgcactccagcctgggcaatagagtgagactccgtttcaaaaaaaaaaaaaaaaaaaaaaaaaaaaagccgactgtggtagctcacgcctgtaatcccagcactttgggaggctgaggcgggtggatcacttgaggccaggagtttgagacaagcctggccaacatggtgaaaccctgtctctactaaaaatacaaaaattagcagggcgtggtggcgggtgcccgtaattccagctacttgggaggctaaggcagaagaatcgcttgaacccaggaggtggaggctgcagtgagttgagatagcaccactgcactccagcctgggtaacagagactccgtctcaaaaaaagaaaaaaaaaaaaaaagggaatcaggcctctgtggccctgggagaaattggaggagagtgtggccctagctgagcagcagctccaacaggtagcagcagagagctgagtgcccagacctgattccagaaccagtagagagctggactggggcaacttggatgtggtgtgggggggtgacgtggacagaggtggtgaggaaagccagtggctacagtcttggccttaagaccagtccagcgttccaggggctgttgggattccttcctcttcaggaagagagaggatccagaccctctcactggtaaagaccaaccaaaaaaaacccaaagaggttgtttctggtgtttcagagactaatgatcatcaaatacacactgcatgtcaccccagtatgatctggtaggtgggggaggggaagggaggtggagaagtgaacacgggccctgaaacttcaaacttggtcagcccaggtcagctacctcatcggagctgctaacagtaagagcctctttctcttggttaccatgaccaccagcatcccctcacattagaggggaagattttgtttaacaagattcagtggttcattttaaatcaacttcaactacagagggcactgtctgataaactgccagagaaagacaaggaagacaattgtgaggtcgatcgatcggctgactatattgacaagatactgattggttacatgttgaagaaaacatacaatacaaaatacagaaaaagttggttccgtcccctcccactcccccccttacccacccacccccaaatactcatcatcatgatttggtcagaacagggctcagagccagaggttggggtgaccgagggtggaggggttgtgggcaatgggttcgtggctgtcacaataatgctgtgataatgctgtggtttcccagcagggaggtgggagcggggagggggctgcagcctgatgagagccagctgaaggaagagctgcctctcccttcctaagccccttcccaaggtctgccccaccgcccaaaccaaagaccactccgaacaaagtgaggatgtggatgctcttgctgggtccgctgttccgcaggagggaaagaaagggtagctgcactgaccccactgtccccatatacaagggttggggggcaagagcatgtggctactcccagcaagggaaaatgggagagcagtagaaaggggaggaagtgggaagagcagaagatcatatatattaaaaaagtgacttaagacttaaaattgaattagtatttgtacagaaaggtgcaggtggaatgactcactccggcctatgatcaaaattatatggagaaatcatggtggacccctccccctgcccccccagtggtggcccgagtcgttaagtgcgattggttagagtggattccagtcgggtcattcaggcggaggaggcgggggcagcgggcaggcaaggggggctcagttgctgcagcactggctccggctggctgggttgttctcctggaggtccacacctcggtttcggcctggagcaccagttgcattctggggctcgttcttgggaagcttcttagctgtttgggagggggaaaagtgcatttgttgggggtaccccaataactctcccagttccactggagcagattctggcctttatacccaatcagtggtaactcacatattgagggcttctgtgtgtcaggtgcattctgattgttttcaggaaactgcggcaaagtaaggttaaataacttgcccaagactacagagctaatgagtggtagagccaggatctgcaacccaggaaggaagattccagagccaaatgagctaaaaactcctaggcagtgggtaggggtagtgatggcaggctctgaaatgggtggcaggctacaggctcagagagtgaaatgttgagactctggcccaggcttcaggaacttctcgggtgaacaaccaacatctacatctgggagtcaggtgatgatgaaaacaattttatcagaaggttaaaagtggtgaagggggctgggcgcagtggcttacgctcgtaatcccagcactttgggaggccgaggcgggtggatcacgaggtcaggagatcgagaccatcctggctaacaccgtgaaaccccgtctctaccaaaaatacaaaaaattagctgggagtggtggtgggcaccagtagtcccagctgctcgagaggctgaggcaggagaatggcgtgaacctggggggcggagcttgcagtgagtcgagatcgtgccactgaactccagcctgggtgatagagcgagactccatctcaaaaaaaaaaaaaaaaaaaaaaaaaaagagtggtgaagggaccccgcaggcccactctagaccagcagacaggtgatatgcccttgctgtggtggagagaggaggggaggagaagcaactgacctattgccatgaagatttcgttcacgttcattgcagtctttgctgatgtctccatgaacagcaaactgttgtcgtctgcataggcttgtgcttcctggtttggatggaggtgagaggaggtgagagggaaatgttggcaggggccagggcccagggcccaggatacaaaccttccttattcgagcaccttatcataatagagatcagctggacacacacaggagttttcaggcctaaggctgccctgatctgggtttccccgctcatgtatatcacctctcagctcacaatcactagcagatgtcttacccgggtttccccaggtccaccctgccttcttgctcttcaaaatcactaggctaggaaatacttctagaaagttaacctacaaatacacttacatgtttgcacaaaagcacaaaagtatgtggatgtctactgcagcactgttttcagtcttttgctattattagggattggtaaaaaattatcatatacagtatgtatagcacactgccatcaatgtaaagaaagggattaaaaaacacgtgcatatttctggaaggacaagaaactggggaaattagaagaagagaagttgagtttctagggttagcagagacttaagtatttctttctcaataagtttaattaaaaagtcaacttacaagaaaagagaagtagaaggctagtgatccatatatacacatacccctaccaccaaagaaagagaaccagggagagacaggtgacgggcaattccttttaggcccatgctttttttattcttttcttttttttttttttgagacaggatctcactgtgttgcccaggctggagtgcagtggcacgatcactgctcactgcagcctcaatctcctggcctctaatgatcctccccacctcggcctcctgagtagcacaccaccatgcccagctaacttttgtatttttttagacatggggtttcgccacattgcccatgctggtctcgaactcctaagctcaagtgatctcccgcctcagcctgcagagtattgggattacaggtgtgtgccaccacacctggctgttttttttttttttttaaagagatggggcctcactcttgctcaggctggagtgcagtgttgcaatcactgcaatcttaaactcctgggctcaaacaatcctcgtgcctcagcctcctgagcagctgagactacaggtgcgtgccaccaagcccagctaatttttaaatcttttgcagagacagagtcttactgtgtcgcctaggctggtctcgaactcctggcctcaagtgatcctcccactccagcctcccaaggcactgggattacagacaggagccatgttaggcccatgcctgaggcacgagaggacagcagatggaagcttccctgttgcctcctagcatggcccttcccaaagcccctgagcatcccaggcgaggccggggggagctgcttactccactccttcccccaagtctgtcatctccccacctggaattccacggctctcttgctggccaggtctgccttgttacccgcgagtgcaatgacgatgttggggctggcctgcctctgtagctccttcacccagttcttggcccgtgcaaatgtatcctgaggagacagggacagaatgtcgaagggacagagaaggcattctgcccagggccacccattagagactctcaagctggcacagccaaattatctaagacattgccacctaaagattctgatgcaatgtccccaaacaggaaatctgcccaccccccacccaggaacagagggttaagcggcctgaaatcagggctctgataacccaatccctgggactttgagaagatgaagggcaaaggaagaagcaaggggaaatctttactgtgttggtgatgtcatagaccacgatggcagcctgggccccccgatagtacatgggggccaggctgtgataccgctcctgtccagctgtgtcccagatctcaaacttgactgttgtgtcatccaggcagacagtctgtgtgaggaaggccgctgtaagagagaaggagcgtccatgggcaagagcgagttggaatccaccccacacaatcccactgttgcttctaggctctggcactcagaagcccaccactgagatgggcacagagaaccctcaagccaggagccaaagcaggcctgagtggggggtggagtttggatttttatgtatgtgtctgggggacggggtctgcacaggctttgcagacccagcccaggcaacggcaggagaagggactcctgcatgcactgagccatctcaggaccactctctgaagagcaacacagcaggggcaagagagggaaagcctaggggaagcctactccaagcacagaagggtgagcgccctcagacctcctcctccgccactcagagaacagaccagcagctagggaccgctccacccctcagtttgctccagcccaggggtgtcactgaccttgggtttcctaaggacattctcacacacttagctatgctggggaagtacacactgttccaccaccaggctgaggctgggtggccggcttcccaaccacccctaccacctccaggcactccagctagccaccgcccctagctctgacccagacctgttcctgtatggccaccctgtgacctgaccttcagtcactaagaggtgactccttaggggaatgcagggtgcctgtacacatgcttcaaaggaggagtccagagctgggacagacagcaaaaggcccctttgcccctggacccagcagagaacccaggacagccatgtgtagaaggctgctttcctggtctgccctcccccagctcactgagggacatggggcactgcctcacttcccctctccagctcctgacccaaatgctgaggaggcagcagggagactgctgacatggcccattttgtttccagctgcctagaaacctcctaccaagagagtagagaaaggatgactcaaggccaaggccagcgttggcccctgcctcttgatgtgtgtgttagccacggaggcaagaggccgaggccagaccctcactcacatcctaaatgctgaccactggaaaatcaacaacaggctgtgagctccagaaagggtaaagtcagcttcagaaacacccacctatcacccagctccgactcaccaggctgttccttcttctggaagtgggaaaggccagggcacatggaccacccattatagtaagaaggggcctcaaagatccagagtcagctctccctccatgaggccagggcagtgaaagggcctcagccaaggccacacagatcaagaaggggcagaaacaggatgggaagctagctttccactcccagcaaatgcttactagcgatgcttgaggggactctggcatggagaccagttgctgggctcaattccagggcccaggtgaggaagtggggctgccaccacagacgcatttagtccctaatgcaggcaggcagcttcccatctcctcaaggtcaaagcatttctttggcaaccttcaggcccctccccgactccctcatgcccactcacctccaattgtgctctcctggtactcgtgaaactgtcccttgacaaagcggaggacgaggctggatttgcctaccgcagactcccccagcagaaccagcttaaattgacagatcttgttcccagcagctggtccattgggtcgtgctgcgcctccccgacccgccattgcccgtccagctgtagtggtccagagagcgtgcgggtggggactggtgctatgcaaagaggcacttagtggggagggggacctccaactgtaagggagaaatgagaagtactgagttagttcagaggccgtcacccgctgtgtccttcttaaattacagatctttccctctggcctcactgaagacctagctgactgcttcccctcacctcacctccctgccctccccactagaggtcaggaggccccactgggctatactagatgtctaccggctctaccaccatctgagctgtaaagaggagaatggtctcccaacttcaggctcatggttctgagcaaacacattgacttctggatcccaaatatgtacattcacctacaaataaacacacacaggcgatgaatgaatgtgtgacagcctggtgacagttaagtcaacaggcttttggggcaaaattaaaacaaaacaaaacaaaacaaaagctcaggaagacactaggatttagatcaataatgaagttccagtctggtagccaggaccacagtggtgaggcagacaggggcccaagaggtcctggtagaaagctcctcagagaaggtgcttggccaacctcatggccattcagggaccagggcctggccagcacaagttgttattaacatagccatttttctcctgccaccttcagaaggactgaccgactttcagtctagggctggactgtgtgcctctgtgcaccagaatcaaagcaatgtttcactctctcatcctgatccttcttccctagttctctcatttttgatgggccaaagtctcgcacccattaaaaaacaaaacacacacagaaacaaacacatagtaaaacacacaccgatacacacacacaaacacacacagaaacacacacaccggaacaaatacacactgaaacacacacacacacacacaaaaacacatgccaacacacacacagaaatacacaccaaaacagacaccaaaacaaaacacacaccgaaacaaacacacacagaaacacacaccaaagtcatagctctgccacagtcagcacagctaccaactttccctttttcaatagagacctcagttccattctctactggcagagatggggcgatggagagaaagaagaggcaggaggtgtgggagggcagagaccaagtcctgcatccccaacagctggtgttccagtcccgacatctgaatcacttggttagtgacagcttcagaggctcaactttttgtttttgttaagttttggaattgcagacacatgaggagcctatctctagaagcctctagaagacataagtggatgtctcatcagacatatacatctgatgtcaacagacatcagaatatatacagaatgttttacaaacaggtcctgtgagtaggtattaagtactgaacactgttcagcatttgaacctgggttggaaagaaaaggtttttattaggctgccctttgcataatggagtctaagatcccagggagagccccgatctgcccctgagcaagggaagtacattccctcatggttaagggacagcaatgtggatgaacaggaggtatctgtgggaagcaaatggtccacattcatgcaagaagctgacagcaaagggcttgttttgttcaacctcaaatcgttttccacatccaagttctcccagcaactcatttaaaaagtgagcttcaggaagaatgattcactagccagaaacaacagtttcctttctggagagaaccaaaggaaaagaggtttgaaatggggcccacctcttccccaaaagtacaaggaaggaagtacggggtggtgggtctcaattagcaaccagaaataccatgtaaatatttcaaagttatgtcatttcaatttttcatagtttaagacgctttctcatttcacctcagtcaatgaagagacaaggtctgtgctttctgcttcttagagatgccttcctcacagtgcctatgtgcatactaggaactcaaagagtgctgatggaaggaaataatttttttttttaaagaaacaaggtctcactgtgttgcccaggctagagtgcagcggtgtgatcacagctcactgcagcttccaagatcctactgcctcagcctccagcaggtatacaccaccacacccagctaattaaaattttctttctttctttctttcttttttttttgcagagatggagtctcactgtgttgcccaggctggtctccaactcctggcctcaagcaaccctcccgcctcagcttcccaattgcacaactattatctccttcaagctttacgacaacctccatttttcagatagataatttaacattcatatattaaatgtcctgctcatggtcacccagcctacaggtgacagaaccccccagacccaccatagacatgatgccatcctccctgctgtggaagaacaatggaggcagtgcctgccctatgtttggtttagggctgctaggtgaatgaaactctctttttttgtggcagcaactttgctggtccaggaaggtctagctctagctggctctagcaacagtcacagtaatcttgcagtttctgagtgccctcaacagtgggaggagccgcccagagccaggcagggcgacagcaacagagggaaaaccacagtggaattacaagttggttattaccatgaatccacgtgacacagagtcttggctgagcaatggtctgtggctggggcactggaggaggaggtatgaatggactgggagatggtaatagaaaaccaagtctctgattccaaaaaaaccaaagcagctggtgcttagggtaccgagctgggaagtaaccagcacctacaggtcgagaaaaatacaggtaacagatctaagtcttgtcactaccaaaccacagggttagaggaacagaatgtgatttttaaaaacaagccagaaggggagacaaataactctcctgcagtggttctcaacggtgtctgtacattgaagtcatctgtgcagccagcccctcgagattctcatgaaggtttggcacagagcccagcatctgcaggtgaagcacacccactgaagcacagccagggctagagcatctggcagagagagagtgagcacaggcactggctttcggcaccacagatgtgactgtctcctgccacttctgaatcactttgtagaagccacctgagctgagcctcagtgttctcatcactaatatggggcacaccagggttaatggcagtgtttgccagctgtctcacacacatcatgttgagtaaacagtagctaagagtactgacagggttatttgtaacactttctccaagactgttggtgaacagactctggccatcccaatgaactgagacaggctctccctggcatgaactagctggtgacatgttctgcctggtcactgatcctgccttccagagatacctgagcaggcacacccagcactttttacggtctgttgcctagtggtttgcctggccctgcttggtgatcaaatgagcagtggtgtccaacctttgcagtcaataaagcccaaggaagccaattttgctaggaagggcgcacggagatatgagggtgtctaagccaggggaaggccagaccgagagccccaggaagcattataccctctcctcccaagcctgggaaactgaagacatggcaggtagtaaaggtgaatgcattcactgagctgtcctgcctcccagggatgtgtgtcttactggcaatctttctttttgaacccctggcaaaaattatccacttgtgcagtcaggtgatggaattatagccaaaactgacatagttttcaaagtcttctttgagacaaaaatcaaattctccataagagctaaagttacagtcaaagttgatttttttaaattagccaacgtggtggtacacgcctgtaatcccagctacttgggaggctgaggcacaagaattgcctgaacccaggaagcagagattgcagtgagctgagatcgcgccattgcactccagcttggggcaaaagagtaagactctgtctcaaaaaaaagttgactttttttcacaagtacaatggccgtgctggagcttcagatctagggagaaagattctccttgccatggacccaccatccaaatcagaaccctggcttgttcagaggccactaagaacaagcaccagtcccaacctcatgtcttccacaggaaaggggagagaatgtataaggacttggagtcacactattttcctattaatacaatgcacatgaaagcgcagaagggatctaagctcctaaacaccctggccctgtgcacaggcacttctgggccaaggatggaagagaaagagaaagaaaaatgggacactgttcttccctgctccggggttccctctgctctggacactacaggtcagtgggtctcaaattctttttttttcttaagttttttttttttttttttgagacagaatctcgctctctcacccaggctggagtgcagtggcacgatctctgcttactgcaacctctgccacccaggctcaagcgattctaatgcctcagcttctaggagtagctggaactataggtatacgtcattacacccggctaaatttttgtgtattttttgtagcggcggggttttaccacgctggccaggctggtatcaaactcctgcctcaacctccaaaagtgctgggattacaggtgtgagccacctgtaattttttttttttttttttggagatagagtctcactgttgcccaggctagagcagtgatgcaatcacgattcactgcagccttgacctcccaggctcaagtgatccttctatttcagcctccagtcaaactcttcttcaccagaatcacccagggcctttagaaaataccctgaccaactgaattagaatctctagaggtggagtccagaaatcagtattttaaaaataagttcccagtgattttaagcagttgatcgaagcacaagagctacagttgatatacgaaggagggagaaatccaagagacagaaaggcacccccgatcagtgctgtgcacaactcgtaagtgtgcatgtgtaagtccatgaatgtgggaggggtcttcagcttcactcagcaactggagccttctccaagacactagatgctgctgcaattcctccccctaacctccctttgaaagtttcacctttcctctaatccacgaagtcacccacttcatatgttttgtccttcctggtaaaagggtgagcaattccagctgatgagtgtctcgtgtacttcctgtttgctttagagacttcctctagctgagagtcctggcacagcctggagagcaagctgattagggaaaccaatcagactgttgaccagggcaggcggggcgtagagactagctcactcaaggttagccaggtggcctgagaaccaagtgaccccgcccagggtcccctgcaggtgcttctgaccagtgactcttcagctacattttaccccggaaaagggcattcctgaatatttaaacaagagtccagcaaaacaaaacaaaatcaaaccaaaaaaacaacagcagaaaggagttgttaaagaaaatggagcaagagacacaggaggaagtaactcggttcaaaggctaaagtggaagacatttgatttaaaagccaactggagtcaaggttttgcaaatgcttcccaggctccgattagttggggagatgatttacccataggctcaagaacacagctcttcctcaaaagggaaaaccactgccagcacacagaaacagaggacagactcacagcaggactatccaggcttctagctggttgcagacccagaggaaagaagaatctgaagcaacgccagccacgatccacacgaggtacccacaaccttccccagcgtggctagcaggttaggacttgggaggctgagccgggtttggttcaagctccactccaccgtttattagccgtgtgaccttggccaagtcacacaagtgatcattatcagcttcagttccttatctaaaaattggtattctttaatactaattgcatggggtagttcagatcaagtgaaacaatgcaccacagtatcaggctgaaggtgagctttcaacaagtggcaggtttattaccccagaggctagaattggtagtcagagcccaaaagggccttaaagaccccatcctactgttgacaattaaagaaaaaaaatgaaggtgaggagaagtgacctgcctagggtcacacagccagctagctggtggcagagcccaagcctgcccaagactcataactcaagcaaggctctcctattagagatagaaagaaaaaccccagaatattaacaatctcattaccataacccctgttactaaaaataacagggactgcgaccttctatgcatgtttttaaaaaatgtagcttttagctaggaaaaaatgagtttctatcaaactgaaaaaagcacattgccgccgggtgaggtggctcatgcctgtaatcccagcactttgggaggctgaggtgggtggatcacctgaggtcaggagttggagaccagcctgtccaacctggtgaaaccccgactgtactaaaaatacaaaaattagctgggtgtggtggctggcacctgtaatcccagctacttgggaggctgaggcaggagaatcacttgaacccaggagacagaggttgtggtgagcgaagatcgcaccattgcactccagcctggacaacagagcgagacactgtctcaaaaaaaagaaaaaaaaaaaaaagcacactgctggatggaggagttataacttgatttgagaggtaaatacatgagtgtataataatataaaaacccatcgagctgtatttacaatttgtaaactattatacataagtcacatgtcaataaaaaggttaaaaaatgctgctggtatagaattttgcatataatcatgaaaagttaaagcttggaaacgatatgaatgcaatctagctcctctgtatataaaatattttctgcctctttagtatgaagaaaataatattaaagacaatcaagggccgggcacggtggctcacgcctataatcccagcgctttgggaggctgaggcgggtggatcatgaggtcaagagatcgacaccatcccggccaacatggtgaaaccccgtctctactaaaaatacaaaaattagctgggcgtggtggcgcatacctgtagtcccagctactcgggaggctgaggcaggagaatcgcttgaacccgggaggcagaggttgcactgagctgagatagtgccactgcactccggcctggcgagagagcgagactctgtctcaaaaaaaaaaaagacaatcaaaaagatgatacctgaattggaaaagaccaacggagaacaaagatacccaaatgttaaacacaaataaggtgcaagacaatgggattcctcataaaaaataagattcccacatatatattaaggatatatttactgtttgggcttaactgtgggctaaaggattttcaagtggtttaaagcttcacaataataaagagaaactgatatttatgtcttttcgatggggagaaagaggttataacagtatgatattctccactccccaaccagtctagagtatatctgcagaggaaaggggggtttaggggttgggggatggaatcaaagagaagggtgtcctctgtgtgaccaggcctatggaactgcttcacacagggcctgtgtcttacctaagagtctaacaggggaagcttggccctggccctggaagccagaagcttaagagcccagggtgagatctagccgaatcccaatggggggtgttgcaacagggtgggctccacctcccaccttcaggaggtccagctcttaaacctagacttgggggaggcagcagtagggaggaaggtgctgcctttccacagccacaggaagatgaccctttttccagcggaaagggaagtaaattatcccagaggggcactgaaggtgagctgggtccccttccacagggaaagcacccccaccttccttaactgagattggtttcatttcattcttttttcaataagatttctgaggcttagtgcctagacttccacaccacaatcaggccctgatggggtccaccagagccccaagtgcagacaccaactccaccaatacctgcaaaaggggccagtgtgcagaggcatcaagaggcttaaagcctggatacacattaccaagtgatctttaataaacactatgcagactgagcctggaactttgctgaagtcagccaggacagagcacagctggctcctgcagccctttcccttgtgtgggaagtcttgtatcacttaggacagatgccaagctcactcgggtggaagacacccctgagggacagacccttagctttccaggactctaccccagcagaacaccatgaaatccttccctgatccctgagcttcttcccagctctcaatgacagatgggttctctggagaggctcagagaggagcagtcagggctggatggaaacctccagcatccactccctctttctgcacccacagggaggaagactattggggtgggaggacatctccatggatctgctagcacagcttggccagtgtggtcggccagtgctgtccacagaagggccccaggcttcatgggcagctcaacaactctcagtcattggccctgctggccaacagaggagacaggtagcacggaaggcccacagacagggcactgcctgcagctgcaccaggcaaggctctccgccagcctaccgattccaaaaggcaccaggggggccaggccctaacgctgacattcctgagactgttctccctaagagggcccagtgtctaacagcacacctcagtcagcaaggttgtggcagattctttttttttgagacggaatcttgctctgtcacccaggttggagtgcagtggcgtgatctcggctcactgcaacctccagctcccaggttcaagcaattctgcctcagcctcctgagtagctaggactacatacgcgtgccaccacatccagctaattttttgtattttttagtagagatggggtttcaccatgttagtcaggatggtctcgatttcctgaccttgtgatccaggctgtgccagattctctactcctgtctagggctgctctctcaagcctcaagcaaaagctcaacttggaatctttctgcagcccagaaccacacacacgtcccagccacagggcttgttagggatgacaacatggctgtatggtggctcacacgccaccagtcagttcttcacctgccaatgccaggcaggatgctaggaagagtgccatccaaggcaaaggttcttctggccccagcctaccccaactatcctgtatttcatttgttcaggcagttactatttagctaggacatttctcaccggaatctcatcaatgtagggcccgtcttccccccgtctcaaaaggggctctgcaggggtcagaagcaccagccaggacagctgccacttctgctgcttccctaggcccagaaagactccagaaacctctgctgaaagtcaggatcagaagcagcacctgttcatccagccactcacaccagcggacacctctccaaaacccttcccgcccttacaaataacagaaaacaaaagaaagccagtttaaatcactgcccctttgttttgccttcagctcctaaacagagagcagaggtcaagtttgagaggaaagtgggagaaaagagaaatagcaatccaaatgcctcctgttcagacaccacacacaccgtggtcagcggctatgcaaccaacaagaaaaaagtcaaagttctcagtgggagacctgagggacgatggctattctcagaagcctgggcaccaaagaacaatattttagaatatatatatatatatatatatatatatatattttttttttttttttttttttttttgagatggagtctcgctctgtcgcccaggctggagtgcagtggcacaatctgggctcactaccacctccacctcctgggttcaagcgattctcgtgcttcagcctcctgagtagctgggattccaggtgtgcaccaccatacccagcttgtatttttgtatttttagtagagatgaggtttcgccatgttggccaggctggtctcgaactcctaacctcaggtgatccgcctgcctcagcctcccaaagtgttgggattacaggcatgagccaccacacccagctcttttttctatatacatttttgagacagggtcttgctctgctgcccaggttggattgcagtgacgcaatcatagcttaccgctaccttgacttcctgggctcaagcaatcctcctacctcagcctcccaagtagctgggactacgggcgcatgccaccatgcccagctaatttttctattttttgtagagatggggtttcaccatgttgcccaggctgatctcagactcctgggctcaagtgatccacctgcttcagcctcccaaagtgctgcgattacaggcatgagccactgtgtctgccatctttcttaatttttgctgaacaaactgtagagtggtgcccagtgaagaaatcaagcaatgaataggtctaaacaagattcaatgagcgaatcacacttctgcttccatggccccaaatgttcataagactagtgtaggtggcaaggggctggagaacttgggggactgagggttgtgagagagaaagcaagagaaattaaaggcactgttgcagatgaaaacaaccacattacaaaattctcaaaggctggacaatgggtttcctttgtgttaacagcacataacagcaagcctgacccatagtaggtgagcacagatacggtgaactgtgcatgtgagaggtaccgcccgcttacacttggcaagtgaacgggggaagttgagggcttaaatctgcattcatctgccagacggctcgggtcccctaacagagccacagagcagctgaggagctgcctcacttccccagggaggacttcctccatccctactgcacagagcttaagagcacaagtgctggagtcagacaacttgaacttcagttcaagttctggaggcaccacttactagggtggcctggtgttgtcactgaacccatttcctcacacgtaaaatggagagaccagtaccacccgtctccaggactgccaggaagatgatgcatgtgagactctcagcaaagggcctggcatcgggaagcattcagtacatgttctgtagcaggggagcccctgcgccttcacttccctgtgaaggagccggactcctcacttcatctgtcagacaacattcacacattcctcttacctccagtttcccgggactccattcttcagcacctctcatttggagagaatgctgaagaggacgtctttcctcagtttcctagaagatactcagtgtcctgtcaacaaccccaatcttgtatcctccagagactagctcccaaaaccacaaaaatggaggggagaaaccattaccatccaataaatctgcatggggtgaaggccccaaccatgcaaaccataacctcttaaaaaaaaaaaaaaagccccattaacacaaagcatcttgggtttttttttggtagagatggggtttcatcatgttgcccaggctgatctcaaactcctgcgctcaagcaatccccccgccttggcctcccaaagtactgagattacaggcatgagccaccgcgcccagcccacaaagcatcttaaagcccaaatgcccttccttccatctcaaagcctctttcaggaaagggaagaagcagttcagttgttgagagggctaggggacaggaatagagcagctgacaaagaaagcagagttccttttaaaaaccaggctgcaaatgctagaggtttggaaactggcgtcattcatcaccacgctgtctgagcagctcagagagcaatctgatgtctaggagagcagccagggttagagaggccacccacgccctcctccatgcctgggatgcctctgacagccacctgaaggggacatacatggagctatgaatagaaggcaaaaggcttgtaaaccaactcctgttaagatcccaagttagtgtttccagcagggctcaagttacacattttcagagagatgacagtacaatggaaggatttcagctattcaatgattcaggatcacggcacaaagtgacagcctaccctgagcccgccaacagccacaaaccgtcccatgggggcagtccattttggaagggcagcaaaagacactgactggcccggaccatgtggaatctcttacaagacccagagtccaggaaggtttagctggagaacttagcacctgaaatagagaacgattatatacacatgcctcatcttcccacacctccataggtaaattccaaaggaaagaccaaatcagaccattttttggatcagtcatagcatcaggcaggggtaagagcagtatgaatgggtgagtagaacaacagccagctactgggattaactcccaggactgcagttgattctcagggggtagatttcccaggtccacctctacctttcccaactccagagtctctagtaactatgactaaccatcaagagaagaaataactcaaggcatccacatcactctatgtcaacatacctgagagaaaacatttgctaaaaaggcagtggccttggagagccagctgaatctacaactctggcacgaaatacacaaagtaagcctggggccgggagtggtggctcatgcctgtaaccctagcactttggaaggctgaggcaagtggatcacttgaggtcaggagttcaaaaccagcctggccaacatggtgaaacctcgttgctactaaaaatacaaaaattagccaggcatggtagcgtgcacctgtaatcccagctactcaggaggttgaggcacaagaattgcatgaatctgggaggcagaggctgcagtgagctgagatcgtgcagctgcactccagcctgggggacagagtgagtctgtctccaaaaatctggcagtgccaaaatgtaaagaagtaaccaaaaaccaaaaacaaaaatcctcacaatgactaggcaggtcaaaggaggctaaaagagcaaccaatgggcaaagctgaaacattttgggcaataaaacaaagtaacattggattatttatttatttatttttgagacaaagtctcactctgttgcccaggctggggtgcagtggcaggatctctgctcactgcaaccaccacctccctgcttcaaaccattctcctgcctcagccaccagagtagctaggattacaagcgtgcaccatcatacccagctaacttttgtatttttagtagagatagggtttcaccatgttggctaggctggtctcaaactcttggcctcaggtgatccgcccatcttggcttccccaagtgctgggaatacaaacgcgagccactgtgcccggccttatcgctggattataaaccaaagtgtaaaataaatatcctggagtccatactgatataaataattgaacaaataaatgggggagaataggccaggcgcagtggctcacgcctgtaatcccagcactttgggaggccgaggcaggtggatcacctgaggcctggagcttgagaccaacctggccaacatggtgaaaccccgtagctactaataatacaaaaattagccgggcatggtggcatgtgcctgtaatcccagctactcgggaggctcaggcaggagaatcgcttgaaccccggaggtggaggttgcagtgagccaagatcgcaccactgcactccagcctgggcaacaagagcaaaactcatctccaaaaaataaataaataaataaaaataaatgggggaaaatagacaagtctctcatatagaagaatttaataattcagctgggcgcggtggctcacgcctgtaaccccagcaccttgggaggccgaaacgggtggatcacgaggtcaggaacttgagaccatcctggctaacatggtgaaaccccatctcagggtgggcgtggtggctcacgcctgtaatcccagcactttgggaggctgaggcgggcggatcacgaggtcaggagatcgagaccatcctgcctaacaaggtgaaaccctgtctctactaaaaatacaaaaattagctgggcgtggtggcgggcgcctgtagtcccagctacgcaggaggctgaggcaggagaatggcgtgaacctgggaggcggagcttgcagtgagccgagattgccccactgcatccagcctgggcgacagagccagactccgtctcaaaaaaaaaaaaaaaaaaaaaaaaaaaaaaaaaaaaaaaaaaaaaaaaaaaaaaagaaaccccatctctactaaaaaaaatacaaaaaaattagccgggtgtggtggcgcgcgcctataggcctgtagtcccagctactcgggagactgaggcaggagaaaggcgtgaacccgggaggcggagcttgcagtgagccgagattgcgccactgcactccagcctgggcgatggagtgagactccatctcaaaaaaaacagaaaaagaaaaaataatttagtaactcatgtagctactccgccctcaacaaggggaacatgaacataagtccctgttccttaggtgtgggctacacagtgactttcttccaaagggtgcatgcagcatggaaaggggaaggggagaacaactttacagagaagcctcacacacatcacctcagccaagtgatcatggttgacatcagtcatggaaaggcttgtggattgtatgtacccttgacatgatgtgatgaaaatagcactttacctctctggtcctccttcccaaaacttggcacagtctacttatgaaaaaaacactggacacagccaggcgtgttagctcacgcatgtaatcccaccactttgggaagctgaggtgagcagatcgcttgagctcaggagtttgagaccagcctggacatcatggtgaaaccttgtctctacaaaaattagccaggcgtggtggtgcatttctgtagtcccagctacttgggaggctgaggagaatggcttgagccgagattgcaccactgcactccagcctggctgacagagcaagactctgttaaaaagagaaaaatactggacaaatcccagttgagaagagattctctttattttttattattttttttgagacggagtctcattctgtctccagcccaggctggagcacagtgacacgatgttggctcactgcaacctctgcctcctggttcaagcgattcttgtgcctcagcctcctgagtagctgagattacaggtgcgtaccaccatgcctggctaatttttgtatttttaatagagatgaggcttcaccatgttagccaggctggtctcgaactcctgacttcaagtgatccacccacctcggcctcccaaagtgctgggattacaggcgtgagtcaccgcgcctggccgagatcctctttagatgcttgcccagcactcctcaaaactgtcaaggtcatcaaaaacaataaaagtctgagaaactggcacagcaagaggagcctaaagagacaatgaatataggtaacatgggatcctggaacagcaaaaggacatcaggtaaaaatctaaggaaatctgaataaaggatggactttaatgtaaaatacgtactaacataagatgttaataacagggaaaactatgtgtgagggattgtgagaaaactctgtactatctgcgtaacttttctaaaagtattctgaaagaataagtttattaagcctcggcaacatagggagaccccgtctctacaaaaaaatcaaaaattgcccaggcacagtggctcacacctgtaatcccagcactttcagaggccaaggcaggcagaccacaaagtcaagagatcaagaccatcctggccaacatggcgaaaccccgtctctactaaaaatataaaaattagctgggcatggtggcgtacgcctgtagtcccagctactcgggaggctgaggcaggagaatcacttgaacccaggagacggaggttgcagtgagccaagatggcatcactgcactccagcctgggaaacagagcaagactccatttcaaaagaaaaaaaaaaaaggaggccaaggtaggcggatcacgaggtcaggagatggagaccatcctggttaacatggtgaaactctgcctctactaaaagtacaaaaaattagccaagcgtggtggcaggagcctgtagtcccagctactcgagaggctgaggcaggagaatggcatgaacccgggagcttgcagtgagccgagatcgtaccactgcactccagcctgggcgacaaggcaagacttcgtcaagaaagaaagaaagaaagacagaaagaaagacagaaagacagaaagaaagacagaaaaagaaagaaagaaagaaaaagaaagaaagaaagaaagaaagaaggaaagacagaaagaaagaaagaaacagaaagaaagaaagaaagaaagagagagagagagagagagagagagaaagaaagaaagaccagcctcaaggtgagcagaggatatccaagtactgcaggcacaggaccagggaatgttaaagaccccatctgtggaatacacatgtgagggctgctcataccactggtctgaacagctgctgccaccacttttttaagccaccttcactcaggaacgagccttgtgcagacatacagaacagtatccacaggcagagtcaaatttgcttccactgatccttgctaagtactggtctggggtcggtgctgcctcaccacacacaactgcagaagcacggtcgttctgtcctgccatcagatacacacacggcagaagccagtcagccggactgtggctagtcagggccgcgccctcattgtcccattaaacccttcaccagaaatggagatttggagagtcttaacttctggaaactgagtttgtgacttgcttcccatcatccgtactgtaacattgatcctattgacctgtttgctctcccatttgtctgtgagcaactttctgggggatggaccaaagatatggctcaagctgtgggatcagatggatttaagtttgaatcataggttcacgacatccaaagtgtgtgaagaaaggaagggaagtgtgtgttaaaagaagtgggcgagggccaggcatggtggcttacacctgtaatcccagcactttgggaggccgaggcgggtggatcacctgaggttgggagttcgagaccagcctgaccaacatggagaaaccccatctctaataaaaatacaaaaaattagccggccgtggtggcacatgcctgtaatccctgctacttgggaagctgaggcaggagaatctctttaactcgggaggcggaggttgtggtgagctgagattgtgccattgcactctagcctgggcaacaagagcaaaactctgtctcaaaaacaaacaaaaaaaaagaagtgggcaaggctgggcacagtggctcatgcctgtagtcccagcactgggaggctgaggcaggcagatcatgaggtcaggagtttgagatcagcctggccaacatggtgaaatccgtctctactaaaaatacaaaactagatgggcgtggtggtacacacctgtaatcccaggtactagggaggctgaagcaggagaatcacttgaacccaggaggcggaggttacagtgagcaagatcgtaccattgcactccagcctgggtgagaggtcaagactccatctcaaaaaaaaaaaaaaaaaaaaaaagaagtgggcaggtgtttggtgtttgctttaagggcaggtttgaatgtctgccctctcctttaacaacttcagtagggagcctactatgctgagtgccatgccaggtcctaaacacacaaagatcaaacaggacccgatctgtgcccctaaagggctcacccaccagagaatgaggcaaataaggaacaatgagatagcagttgagaagacagcccatgtaggagacaagccctcagcccatttggggcaagggaaggcttcacagaggaagtggcattcaaactgagctttgagagaaaagtagggagatacagtttccaggcacgtgaggtgcagaagagccttctaggcaaagtgaacagtaggcatttagcccagagatgggtcaaggagaggctgtattgaatagcgataagagcacaccccatctctgccattactacatagtcccccactctaacatggggattaaacacagaacctacctcctggggttgtcggaggattaaaggagtcaacacatagggctcacaagagtgcctggcacatggcaaaaatagaagtttagcttttatttgtattactgttcttatacatagaggatggggctatttaattggaaaagtaatctcttacaataccaagctattaatgcagaggatgccaaaaatattccgattctcctctgccaaggtttttgcaagcatgattacctggattttggcacatcctagtttataaattctacctaaagcagtgcttctcaaacagccccaacatatgtacccttcactcaagtcaggggagaggaaactcccagaaatctgggagttgaacccaaagcagctggctacaagcaaaatactgtctttggccaggtgcagcggctcatgcctgtaatcccagcacttcgggaggccaaagtaggaggatcacttgagcccaggagttctgagaccagcctgggcaacatggcaaaaccctgtctctactaaaaatacaaaaactagccgggcatggtggtacatgcctacagtcccagctactcaggaggctgaggtgggaggatcacttgggtccacaagatcaaggcggaagtaagccatgatcgtcccactgcactccagcctgggtgagagaggccctgtctcaaaaataaataaattaattaattaattaaagtttcctgtgttagcttcaattcatgcaaactttgcattctaatctataatagttacaggactgttttaatattaaaacgcttacaactaagtaaaactgaagtggcacagcgttctcttctgtaaaatgggaatacaacccacatcaattctgttcaatgtctacaaaatgagacaatttgtgaaaccatcaagcaatgtacaaggcatcccagcagacattttgtttttgttttagacatggggtctcattatgttgcccaggctggttttttttttttttttttttgagatagactcttggtctgttgcccaggctggagtgcagtggtgcaatctcggctcactgcaacgtccacctcccaggttgaactgcctcccaggttcctgcctaagcctcccaagtagctgggattacaggcatgtgccaccacgcctgactaattttggtatttttagtagagatggggtttcaccatgttggccaggctggtctcgaactcctgacttcaggtgatctcccagcctcagccttccaaagtgctaggattataggcgtgatccaccacacctggcccccaagctggtcttgaactcctgggatcaagcgatcctcccaaagtgctaggattataggcatgagccactgtgcccagccccagcatacatttggtacacatgttgaatcagaatcagtgttgaggctgggcacaattacctgaggtcaggagatcgagaccagcctggccaacatagaggaaccctgtctctactaaaagtacaaaaattagctgggcatggtggcacacgcctataatcccagctactcaggaggctgaggcaggagaatagcttgagcccgggagacagaggttgcagtgagccaagatcacgccattgcactccagcctgggagacaagagtgaaactccatctcaaaaaaaaaaaaaaaaaaaaaaaaaaaaatcagccagacacggtggctcatgcttgtaatcccagcactctgggaggccgatgaggcgggcagatcacctcacctgaggtcaggagtttgagaccagcctggccaacatggtcaaaccccatctctacaaaaataccaaaaaaaaaaattagccgggcatgatggcaggtgcctgtaatcccagctactcaggaggctgaggcaggagaatcgcttgaacacaggaggcggaggttgcagtgagcctgggcaacagaatgagaatgagactgcctcaaaaaaaaaaagaaccttcaaacccctacctacccatcagaggcaactgctattttgtgggcatccagtctgccagcactggactagctcctttctttgtttctaattctgcaaggtatttagcatccccattttaccagaagaaacacaggctcagtgaggtcaagtaacaagcccagggtcacacaactggtaagtgggggaatcaggatgagaactcaggtccaactgcctctgaagttctagtgccttccacccgaccacactgcctgtttactgggcaagggttagaagtagaaggtctggccaggcgcagtggctcacgcctgtaatcccagcactttgggaggccagggtgggcggatcacgaggtcaggagatcgagaccatcctggctaacacggcggaaccccatctctactaaaaatacaaaacaattagccggacgtggtggtgggcacctgtagtcccaactactctggaggctgaggtaggagaatggcatgaacccgggaggcggagcttgcagtgagccaagatcgcaccactgcactccagcctaggcgacagagcgagactccgactcaaaaaaaaaaaaagaagtagaaggtctaagaagtacttgcttggtggggctgaatttaaatgtatgatcttgctctgtttccatgtaaattctagtgacaggagctcctggtggcaagccacattcttcccacttgcaagcagcaggcagcaccacaggagaaacagaggactaaccagaggcccgctctgttgcttcccccttaaccctgcccagtgggacccctgagtttactcactttaactttcattttctagccattaggactttcaggttcccagaaaaattaatgacatgtagatgtcagcaaactctcaggccctgaagagtactgacttgggactcctaactgttttggtcctcagaggcagaggtgaaaggggtcaagagagaagacaggaggtcgggtagacgctggggaagacaaaaaaacagaggagcgctagtgatgaggagggctaaagagttaagagtctgcccttgtgccgtggcgcactcagtctgcatgttcattcatttaacgaacaaaccaggccgaagaagggcccactgttagatcaggtcacatctgaccccaaatccaagccccagctctactactttctaaatgtatgatcgatcttaggcaaactacttaagttccttctgcatcccttctaaagcagggacacttgccttatcttactcaaaaaaaaaaaagtaataataaaaattaaaaacaaagtggggaaacaagccccactatttcccaaggcacctatgaggaatatgtatgaaaataattttgcaaccttaaaatgatttttaaaaattagtgttactgtccctctacagtttaacagccctctaattgtgagaggcaagagggcaggggaggaacagcatcagaaaggaggggttctgtcgcacacggagccatcgctctctctgccaggcagagtcagacctctgcttggactctataatttctaggtgccagaagtggctgcataacgacccaaagcactggggcctgcctcgtctctctaaatggcagagcttccccttcaaagtcgtttcaggttgggtgcagtggctcatgcctgtaatcctagcactttgggaggctgaggtgggtggatcatctgaggtcaggagttcgagaccagcctggccaacatggtgagaccccatctctactaaaaatacaaaaattagctgggcgtggtggtgcatggctgtaatctcagctactcaggaggctgaggcaggagaatcccttgatctcgggaggcagaggctgcagtgagccaagattgtgccactgcactccagcctgggtgacaaaacaaggctctgtctccaaaaaaaaaaaaaaagtcgtttcagagtcagagctgggagagcatgtccagacaaagaaaagaaggtctcctcagaaggctggtcggcctcatcccagcactcctgaagagtgacaaactgcggtctactcctgaagacctaagtctggtcagagaccaatggccagtgagcagtcaggcctctctggccctgcccctcagatgcccaggctgaccagatcagagaaactaggttggttgaagaagtctccaatgaaccccaaaggaacccacacagatacagagcctgtgatccagctgttgaccctaataaggaaggcttcttctgttgtccgataaaaagtgaaataagtaggccgggcacggtggttcacacctgtaatctcagcactttgggaggctgaggcgggtggatcacctgaagtcaggagttcgagaccagcccggccaacatggcgaaaccccatctctactaaaaatacaaaaattagccgggtgtggtggcaggcgcctgttaatcccagctactcaggaggctgaggcaagagaactgcttgaacccaggaggcagaggttgcagtgagccaagatcacgccactgcactccagcctgggcgacagagcaagactccatctcaaaaacaaacaaacaaaaaagtgaagaaagtacatcctagctctactcaaaagactgtaggaatcagatactagccactgtccagaagccctcaaacacacctcaaggccaaaaaacacagcacttttaagtggcaagcgagggtggtaaaggtagcccagaacactgaagagctacagaagttcccacaaactgcacggctttccgtcccttcctccactgtagatagcaagggtcagtcatggcctcagagccaggctactcctcgttaaggtacagtctccggcctgtactttggccacataacaaagcttggtctgagacagcagctatttcacacacctaagccccaagcaacagacaaggatcagtcaatatggttgagggaacctgcactttctggcatgtatcggaattcctcaggctacaattaaaaatccagaactgccattgtgatcttgacttagtcctcagtaataagtccaagccctgaagggattgcagacagaccctggcgtggtgtggacctgttgctcagggaggtgtatgtgtgtgtgtttgggagtgggaaagagatggcccttcaattccagactcctcattttgggtcttattctcctccctatagacacacggacagcagtcccaagaaaagcagtccctttgaggcggctgggaaaccactcacgtgctctgggaggacagagctgagcctggagcaaggggggaggggaaagaagataatgaatgggcacatccaccctgatctgtgatctgtagctaggattgagcaaacctcagctaaattcttcagaggcagaaagagagagacactcaaagaacaacataactagaggacagggctgggagacagaaggggcaaaacaggaaaacagctcatttctagtaagtgactttaaactcagctgaggtcctggttggttctctggcttgaggaaagagaggaagtaaggagttgcgggagcgcacacacacttctgtgcgtgtggaacggtctcacccagacgacccccctcccccaaaggaaatcgagatattcctctagggctagaggggacaactggttttgtgggacaggaggaaggaaaacggcgacagacagcactccctgtcacttctaaaagagaagagggacaggttccttcacacctagcaaagatcctccgattctggaagcagggggagcggaacttagggtacctctctcccacaactagaatggacaggccagaggacagtcatagcggtttccttaaggctcaccaaaggcaggtaagctaaggaaagaagctccccacctcctatggcccgacgcctggggagcccctcaagagggggctacgggtcgggggaggggtcagtatccccctaaactggggctgggcgggaggaagggctgccctggagatgcttcaacgcaggcgagacaccaggtcctgggacaagcatactcacggcggctccggggcggcggcgttacttggggccggggctcggacgggatccgcttctctccccgccggcggtgtcccaggctccggcctccacttccgcctttcagccgctccggatccggatctccacctccgccccgcccctcaatactcccaggtgattgacagtgcggagaccaatgggaggcactcttggccgacctacccagcggcgccggtaggaacgcgggagtggcggtagggagcgcgcgagggatcgcgggacttgtagttcgcagcgctgggaggagtcagtggctgcctgggacttgggcttagggtggagccggctgactgcgaggcggagcccggccggaactttttttttttttttgagacggagtcttactctgtcgcccaggctggagtgcagtggtgcgatctcactgcaacctctgcctcccgggttcaagcgattctcctgcctcagcctcccgaggagctggattataggcacgcaccaccacgcccgactaatttttgtattttttagtagagacgggggtttcgccatgttggccaggctggtctcgaactcctgacctcaggtgatccgccctcttcggcctctcaaagtgctgagattacaggcctgagccaccgcgcccagcctacggccgggaactttttaaggctaaccctgccatccgcgtcaccgccggttccggacgccccgagggaaggcgggtggtggagcgttggaagaaggcagaggattgtgtgtgcagaattgggaaagaaaaaacgtggtgcgaatgaatatgcacgcgaggcctcagtcctgtgaactcgctgatctggagaagcccttgtctgcactgtccgcccgattgccaggggcgtctgtgattgggaaggtgaggaaagcgctgcaggaagagttctctgcaggatgctgggtgagatcaaagggagagcttctgccaccacctcctacttggtgtgtgcgggggccggcacaaagaccatctctgcctctgccttcccctgctcctagccagggtcagctcttctctctgacgcggaatacagagctggacaacctctgcctcggccctctccatccgtaaataaagactagaaccacccccactctgcactctccccctctatggatcaggaatatttgttttttctgctcctctcaatatggactgggcccgctcctgattcctcccacccttacctctcaacacaaaccagtacctcctcttcttttgcatctcatcctcaagggacactactgaaaacctgtgtggaatcaaagctcaccggagacagctgtggccattgtgcctataacgccaacaccaggcatatcctggagcctcagctggagaatttacctgtcttggacaacctgccacaaaactgtgcccacatctagttccatctggtcatcagggcgtctctctttcttacacccataacacacaatccccacttccgcgccagtgttcatgagaagtgaaaaggaagagggaagagagggcttgttgggaggacagaggggatggggcagagtgggattcctagcaggttctggctggtgacaagctcttcccccagcccccttgccatacccagttctggaacagttccttatacaggagggatgggtagtcccctaggcccacctttccaaggctggaggtgggccaaagccaggactctgtccttcccacatactgtgtgcatacatggctgtgactggggtgcaggggagagaagggggtataataggcccatagtgactaattaagtttcttcctcaaccctggggcccctggtggtgtgaatgtggtgccaagtagattggctggtgcctctgcccttcctagagatagcaactgggccctggggtacaacgaaggtgagggtggggagtgattgctgtgttggctcctccaaagccctggggctctcagagtaacccccagaaacacccagagccaataactacaaaaataaagagtttatttcctatccaaaagtgagcccagggtgttgggtggtagaggagagctggagacctgggcgagttttggagcagtccaggccctgagtgagaccatgttgtaatgggggagaacaggcttggcagcggtctggggtcagggaaaggatagggagtgctgttgggatttttgagttgctagcagcagaagagaccaccttgagagacagcctgcagagagacagaaacagagatgttgacagacccacgcctaggagtagaagcagacattactgggcccaaaaagcacctgttgggcacagggacctgggaacacactgttaggtaaggcagaggttgcaaactcaacccctgggctccaccccggacattccaaattggatgaggcccaggaatctgctttttatttttttatttttttgagcctccgcgcctggcagaatctgcgttttaataggatctcaggtagttctgatggacactcaagttttgagaactcaaatacccacagagaccaaacaaaaatttcaaacaagggaagctagctgggtgtcgggagatgatcaagaaacgtggtgactgcgaagtagagtgcagagcagatcccatctaaagaggacagtggccacccagcccagctgattgccagttattgccagatggaatgttggcccacggtagcctgatgtcctgaggttttttttgttttgttttgtttgagcagggtctcactctgtcacccaggctggagtgcagtggtgtgatcactgctcactgcagcctcaacctcctgggctcaagagatcctcccacctcagcttccagagtagctgggaccacaggcacacaccactacacctggctaattttttaatttgtatagagatgggtggggggggtgtcttgctatgttgcccaggctggtcttgaactcctggattcaagtcatccttccacctcagcttctggagtagctggaaccacaggcactcaccactacacctggctaatttttatttatttatttatttatttttgaggtggagtttcactcttattgcccagacttgagagcaatggcacgatctcggctcactgcaccctccacctcccaggttcaagcgattctcctgcctcagcctcccgcgaagctgggattacaggcatgcaccaccatcccagctaatgtttgtatttttagtagagatggggtttctccatgttggtcaggctggtctcgaactccagacctcaggtaatccacctgcctcggcctcccaaagtgctgggattacaggcgtgagccaccatgcccagcctacacctggctaatttgaaaaatattttgaaaaatatttttcaaaataatcccagcactttgggaggccgaggcaggtggatcatgaggtcaggagatcgagaccatcctggctaacatggtgaaaccccgtctctactaaagatacaaaaaaattagctgggcgtggtggcaggcgccggtagtcccagctactcgggaggctgaggcaggagaatggcgtgaacccgggaggcggagtttgcagtgagccgagattgcaccactgcactccagcctgggcgacagagtgagactccgtctcaaaaaaaaaaaaatatttttataggctgggtgcggtggctgacacttgtaatcccagcactttgggaggacgaggcaggcggatcaggaggtcaggagattgagaccatcctggctaacatggtgaaaccctgtctccactaaaaatacaaaaaattagccgggtgtggtggcgggcgcctgtagtcccagctacttgggagcctgaggcaggagaatggcatgaacccaggaggcggagcttgtagtgagctgagattgcaccactgcattccagcctgggtgacagagtgagactccgtctataaaaaaatatatatatatatattttttttatagagatagggtctcgctatgttgctcaggtggatctcaaactcatggactcaagcgatcctcccacctcggcctcccaaagggctgggattataggcatgaaccactgtgcccagtgctacattttgtagagaaattggaatatctgtattcctatataacctgtctcttttttttattttgagacagagtctcactgtcgcccaggctggagtgcagtggtgcgatcttggctcactgcaacctccgcctcccggattcaagcgattctcctgcctcagcctcccgagtagctgcgattacaggcatgtgccaccatgcccggctaattttgtatttttagtagagatgaggtttctgcatgttggtcaggctggtctcgaactcctgacctcaggtgatccgcctgccttggcctcccaaagtgctaggattacaggcgtgagccaccgcacctggccctgtctcatttttaatattggaactaactcatattttgaaaataatgctgcgcgagccgaagagtacatatctggagccatccgtttgtttcctgtgtgggctgtgggatgaggtgagcctctccagcctgggctcatggtgggcggcctaagaaatcatgggttgctcaaattccaagcaacatctcaaacctacccctctctaggtaacattgctcttaaggtcttcagcagagacccaggggctgagacagaagacctcacaatatcactaagctatcttcaggcaaaatcctacaacctgtctctcttgctatagacgctaagatcctgtctggtcttcccttcatgtcctaggctggagctgggtcccttgcccatcccctctgctcccccatctctacctgcctccaggtcctggggagaaagtaggatctcatctgcccagcccaatgggcactgcggttcatctcatgcctgctgggttccacagccctcaggtggctcccctcacagagggggaggttggggaaggcttggaaaagggaatagcgtcagaggtaaccacgcttcattaaaaagtccagaaatccagagccaaccaggccagctggtggctgctgaccccaaggcaggaagccaaggggcccaggtcctccctgagtggtgagcggcagcgcccaccccagacaggcctgggccctgggccagggtcagtggaacgtgtctgacctggactggaaactgtgcctcaagaggcttggggttgggggtgaggcctctggcactggagagggtcccagagggtcaggctctgaggggtaggggggcaatatggaaggtctcaagtccaggagcgcagtccctgtctccatggtccccacactggctgggcagtgaacttcagcaagcgtagtatcctggaggctgggtggtggtctggacgcacaaggagagaggcatggtggcctcagctgtggacaaggagggtctggggtccaagcggagcctgctgggtggcctgggggacccagcctggcctgcagcaggcccatgatgtgccgcagctcccggctaagctgagacacctcctgattgagacgagagatctgttgaaaacacatcgagttgtttcacaggtgccacagtaataacaaggtgcacccccctctccagtttacaaagctctttcgcagccactttctgctcatggccaccctgggaaaaaggcaggatgagggttatttttgcctagatggaaaatgccccagtctctttccagaaaggatttggggcagcagatattgctattcctcccctacacacacacgcgcgcgcgagctttcccaagatgttaaaaaatgtgctcaaagaggccacacatctgtgaagtgacagccttattattctcagctgatcccatcacacaagctcaagggtctctatcagtgcttttcacacttcagcgactagagaatcaactaagaaacttttgaaaaggcacatttctgggctccgccccagacattcccaatcctaagaggcccagaaatctgcatttaataggttgtcaggtagttcttttttctttttctttttttttttttttttttttttttgagatggagtctcactctgttgccaggctggagtgcaatggcgcgatctcagctcactgcaagctccgcctcccgggttcacgagattctcctgcctcagcctcccaagtagccgagactataggtgtgtgccaccacgcccggctaatttttttcgtattcttagtagagacagggtttcaccgtgttagccagaatggtctccatctcctgacttcgtgatccacccaccttagcctcccaaagtgctgggattacaggcatgagccaccgcgcccggcctatcaggtagttctgacagatacttgtttgggaaccactggcctagaattgagggatgcctgaggccttgagcggacttgccctcaagcttgctgaacaagagccagccccgctcaggccccagggcctgaaacagcccaggcaccgcccctctgggatgcccgatgtttatcagaacacagggaaggctggctcccaggggctgggcctggttgctctgcggtgacaactctgagatcccttggggaggaggcagaggctgagcctcagcatatagaatctaggttcttcctggacagagttcagacatctggatccaggtcccccaggcctgaaggcctctcagcctccctgtcccctgcccctgcatctgcttagcactcattacccacggctggggtaagggaaagaggtagggcctgggcaggaaagagtcctacagtggtggagggagaagagatgctcttatcaggctgggaaacttgagccagtcggggaggaaggaaaccaactggtacggagtgcctatgacatgccagggattggaccaggcacatatgcactctcatttcatccttaaaactctgggaagcacatattactatttccccattttagatgaggaagtttaagttcagagcggttgtgggacttgcccaaggtttaagttcagagtggttgtgggacttgcccaaggtcatctagctagcgtgaatatctctctcttttttttttttttttttttctgagacagagtcttgccctgtcgcccaggctggagtgcaatggcgcaattttgtctcactgcaacctccgcctcccaggttcaagcgattctcctgcctcagcctccagagtagctgggactacaggtgcctggctaatttttgtattttttagcagagatagggtttcatcatgttggccaggctggtcccaaactcctgacctcaagtgagccacgtgtagggtctgaaatgctgttatatcaggcacgtctctgagccagccccaacccacctcctggttcagccggcaaaccttttccttcacctcctcagcctcactggccaattctgggctgggcctggtccctgcagggtgaagggatgcaggtgagttcatggagcattaatacctgagcctataacttgggctggaatcctcctgtcattgggcaggcggagagcagggggagacaaagctctagggtctgtaagatgggaaacctaaactccttagcctggttctgaggcccctgtgtaactctccagcctcatcctgccccttgccccatcttggtacggagcttctctttggtgtctgaacacagcatccctctggttttcatgcctttcaacaattgtttttgtttttttttttgagatggggtctcactctgttgcccagggtggagtgcagtggtgtgctctcagctcactgcaacctctgtctccgaggttcaagcaattctcctgtctcagccttccgagtaactgggattacaggtgtgcaccaccacgcctggctaatttttgtatttttagtagagatggggttttgccatattggccaggctggtctcgaactcctgacctcaggtgatccaccctcatcagcctcccaaagtactgggattacaggcatgaaccaccatgcccagctcaataactgttttgctccactcttcaagatcccacccaccctttaagaagcaacccaagcatcccctcctctgcaaggaagtcgagtgagcaccttcctcttctaccacagagtcctgttcttgtctgtcatggtatttagcatctggaattgtttatctgtgtacagaggtgtctccctgctagacttactccaagagcgtgggccaggtctgttttatctgtgtattcccaggatggcacctggcacatggtaggcccctactacatatgggatggatggacaggtggatgggcagatggatgacggggttgaagtccactgttggcccttacctgtagggggcgcctgggagcggggccttggcagttcaggcctcctgctgaatcggaatgaaggggcctcagctgtgctgccagagtcctcaatgccatccactatcctgggaacagggcagtgctcatcagcaccatggggtgagggtaagggccagagcagagcagacagagggggactgggggcagcagtgccagggggcggagcaagagcagcagtcaaagtgggttggggttgcaagctgtggttggaagggtgcggtgggcacacgggcagagacggaatgtagcactgtttggaacgccagggatagagcccagagaaggttctggaagccaataggggttttgggaaagcaggggaggctggcgtctcaccggggactgaggtccggaggtccaaaggttcccagtgggggaatgagaagctgagggggcttccaggcagcagagcacctgggggggccgtgaggggaggcactgtggccctggccagccagggcaggggacagggatggggataaggaaggagaggagacaagggctgagaatgggggcagctcctcgcccaaaaggctgaccagggagccccgaggccgtgctgggctgaggttgggcagcaggaggggccgtcggggcctgggaccacccccaggctccgcgccactctcggcctctgtgatggatggcagcgtcttgtctgaggaggagccgaggctttctgagcggggctgcgggcagagggggcagctgatgtcgcaggacagtgaacaacagaccccttcattaagtaagagccttcgccggcggatgcagctccccatccatggaaagggggatgctgctacccatctcaccctctccccagggcaattcaaccccacccaggaagtgggtgttacctgggagaggcgaggggatcgggaaaagcggctgaggccctgtggggacataggagagttcaagctgattcctgccttcccgcggccatagcgcagaccctccctgtcccacccaacagtgttatggggttgagaatgtggagtcttttgtggagctgagtcagaaactataaccctaactcaaacaaacactgcatatcaaagtgagactgaaaagcagcaaaagaccaaggcccaaggtgtaatgtacaggcctggcccagagcctaaaacaaagtggactcaggagacatttggtgagagaagaggaacccccagggcatgatgccccgtccagagaggggcttgaaagaggagcacatgagggggttgtttctaaagggaggagcctggctgggcatggtggctcacgcctgtaatcccagcactttgggaggctgaggcgggtggatcacctgaggtcaggagttcgagaccagcctggccaacatggcgaaaccccatctctactaaaaatataaaaattagccaggcatggcatgcatgcctgtcatcccagctacttgggaggctgaggcaggagaatcacttgaacccgggaggcggaggttgcagtgagctgagatggcgccactacactccaggctgggtgacagagccagactgtctcaaaaaaaaacaaaaacgaaaacaagaccgggcattgtggctcatgcctgtaatcccagcactttgggaggccgaggtgggtggatcacctgaggtcaggagttcaagaccagcctggccaacatggtgaaacgctatctctactaaaaatacaaaaattagcagggtgtggtggtacacacctgtaatcccagctactcggaaggctgaggcaggagaattgctccaacccaggaggcagaggttgtgatgagccaagatcgcgccactgcactccagcctgggcgacagagtaagacttcgtctcaaaaaaaaaaaacaaaacccaaaaaaacaaaaacaaaaacaaagggagggtcctttgaaggagtcaggagtctggggtggggctgaggggtggtcagcaggagatggggcagtagagttgggagtagatggcgatgagagacggccaggggcctgggtgatggccagtgtagtgtcagcggggttggaaggtatgaagcaggtaaggggcaatggaggagggtgcctgggcttcaggcatgtgtttttagggtggagggaggttcatgggactctcaggctggggaggtctgctttggaggaagggactctggaaggatggcggtcatcaggggtgtacatacactggtgtcagagccctggcgcaggttgaaggtgaggtcccggggcaggccagcccggaaggcagccccatactcaggatagagcctcaggacctcagccagccctcggctgctcagctgctgcaggccacagtaggtcagagctttcacatcagcactggtctttagcacgaagtttgggtctgctcccaacccaggctcctgccccggctcagggatatctgctccaatcaggtcccccttccctgtaggtaagggatggggacagtcagctggggcagtgagaacgaaaggatatcagctggaggtgctcagtggatttgaggggtggtcagtgtgtttgaaggatggttgaaggtgggccagtcaatgggattggtggaaataaccaatggaattgggaaaaggtcagtgcagaatgactggtaaggctgggagacagtcagtgggagtgagtagggccagaggaacgatcagtggaattgggtgataaaaatcacaatggccggaggggtcaggtcagttagagggtaaaagtgaatggagtttagggtcactggggaaaggtcaatggggttgggaagtggagcaatgggaaaggatcaattgagctgggggacagtcaccgggaagggttgatgggttgagggatgcccaaggggattagggggaattgtctaaaggcgatggtcgtagggcggagggaccgagagagtactcctcagcaggaactgtaggtatccacgaggggtatcccattccctagaatcctggccattcccaagtcctcagtgggggttgcggggggtggttccagggtaggtagtagagggtgacggtgtccttacccaggatggccagcaccatgttgtctcggagcacctcaagcgagccggagcagacatagtaatgtgcctgcagggcatccccacggcgcaacaggtactcgcccggagcgcagaacgaggtcttgatgtgcagcgatagggcccgcaggcagcccctgctcgctgccccgaacaacggcagctgcaggatctcccgattcaggtgcatagcaatgtcagctctcagctcgtctgggaagtcacgcagtaactgcataaggggcataggtcattctggccatccccctgcagctactacttgagtctacaaatgtgctgagctgtcttcaaagagagaattcctcttgcccttgctttgaagtcacccattccagaccttcagtacaacctctgtgtctaacctcaattttgcttgctgcatgtacctcacaacccaatttcaggggcagagaccaggtcttctcccatcagttccctgcctgtggctacatgctggtcacttaaccccatcgttcagaagccatcacttgggggtcagccttcaactgggagtcaggagaccaggagtcagctcggctcctaagtccctgtggaccttgggcaacccatttccgctcgctgggcctcagtatcccagtctgtatctcagtctgtaaaatgcagagttgttattagaccatgggcactaccaatgacctcttatggccacactgcatgttcacatcctcatatggagccccttggccaccctggcttgttgaactctccccttggtccccctgggctcctgtgaagggttccctcctggttcctcccactgcttacttcctcatttcctctcaggctcctcttcctcagccaacaccctggactctcactttccacactctccctgcatcatggcaactggccccatggcttccctactacctgagtgccctgagccctaactctgggtccagacctgatttcttttttctttttttttgaggcagagtctcactctgttacccaagctggagtgcagtggcacgatctcagctcactgcaacctccgcctcccaggttcaagtaattctcctgcctcagcctcccgagtaggtgggattacaagcacgcaccactacgcccagctaattttgtatttttagtagagacggggtttcaccatgttggccaggctggtctcaaactcccagcctcaggtgatctgcccgcctcagcctcccaaagtgctgggattacaggtatgagccaccgcacccagccaagagctgattcccatctacctaccgggcagcctctctctggacctcccccaggcactataccctcctcttggtctgacccgggactctcaccttcatcccaaagcccatcttccccctgttatgcctccatccccacccttggcctaagccagaaaactgggagtcactctgagctcctctcttgcaaccagcaggagattaccacgtcccacagatcccatcctcagagatacctcaccaacccattccctccaagatccccacaccactccccagtctaaacattaagcaggataaaatctaaattctaggccatccctgagctgggcctgctgcctcccagcccatgtcgtgccttcctgccctgccttctccctccgcagcactcacatgcccattcctgcgggcttattgagccgctttcagttccctaaagcgctcactctgctcttttgtgccatcacttctggcctgtgtccctaaggccatttctacctggcattgccaccttccttgactcctccccacccaggcacaatgaggacctgaaggcaccgacatccctcctttacagccccattcagcgcggcactctctgttcatctttctgcctccctcaatactctgggtctccctgagggccagggctaagtgtcatcatctctaagctctctgtgcccagcaccaaggctggcccaaagcaggcactcaggaaatgttggcagaagggagagtcgcatcagctgggccctgagctctttcattcccttattcaagtgcaaagaaacaagaatttggccggctgtggtggtgcacgcctgtaatcccagcaaattgggaggctgaagcaggtgtattacgatgtcaagagttcgagacaagcctgaccaacatggtgaaaccccgtctctactaagaatacaaaaatcagccgagcatggtggcaggtgcctgtgatcccagatactcaggaagctgaggcagaagaattccttgaacctgggaggcagaggttgcagtgagctgagagcacaccactgcactccagcgtgggcgacagagcaagactccttcttgaaaaaagaaaaaaagaaaagaagcaagaatttgtattttgggcaaatgtgtgcccttgtgaacaatacctcaccccccgggccctgtttgcctcccttttattttatttatttatttttttatttttatttttatttttatttttgagacagagtctcgctctgccgcccaggctggagtgcagtggcacaatttcggctcactgcaagctccgcctcccgggttcatgccattctcctgcatcagcctcctgagtagctgggactataggtgcacgctgccatgcccggctaattttttgtatttttagtagagatggggtttcaccgtgttagccaggatggtctcgatctcctgaccttgtgatccgcccacctcggcctcccaaagtgctgggattacaggtgtgagccactgcgctcagcgcctccattttatttatttattttttttgagacagagtctagctctgtcacccaggctggagtgcagtggcatgatcttggctcactgcagcctctgcctccctggttcaagtgattctcgtgcctcagtctccctagtagctgggattacaggcgtgcaccaccacagctggctaattttcatatttttagcagagacagggtttcaccatgtcgcccaggctggtcttcaactcctgacctcaagtgacctgcccgcctcagcctcccaaagtgctgggattacaggtgtgagcagccgagttcggcctgcctccattttaagctacaggggcagcgactccttccccaccccactgcagggccacgcggagggcaagggcaagattggagaccctgcaggctacctcgttggcgtcgatgccgctgttgacggcccacgtggtctggaagtattcgagcatgcgctgcttgagcggccgcggcaggcggtgcacacggatgaagtccttgaggtccttcatgcggctgtggtagagcgagcggcgcgagtacatgcgctggatgatggctgtcacgttcccgaacaccacagcgtgcatcagggctgcagcagcagcagcgggcctgtcaggggcggccacccctctggccacctccccagctcccaaacccaccctgtcctggaccaagagccagcgggctcctgtgtgcctaccaggtgccaggcactagactaagggtggggaatagggagtggtccagagatgggtaacaccccatgctcctctcaggcctccccaccattaggtcatgaacctgggtttcccatcccctttgcaaaagtccacgcctgtttgtggcatccccagggccagcacatagtgggcactcaggaaacgtccgtgaatgaatgcgtgactgtctggacttgggtagacacctcgggcagatgtcttgccctctctgggcctcagtttccccgtgcatgctgggcttcgcagggccccactgaggcgtggcaggtctggcctcaccgcctatgagcatcgtgcagatggagaagatcttctccgcgtcggtgttggcacacacgttgccaaagcccacactggtgaggctgcttagagtgaagtacagtgccgcgatgtaggcgctgcgccgtgatgggccgcccaccgagccattgacatagggcacctccagacgcttgcccaactcatgcaaccagcctgcagggtggacggatgcagggagccctggctgtgccagcggtggagaaccagggttccctgagccacctacgcttgaccttcggcaagtatttatacacaggttggcacaggaaatgtggggagtggcctgggcctgtgtctccccatggtgcattggttacagttgcattccaaggccgccaactaactacattgctgagtgttcaaaggctcctgaaactttctaatagtttattgtgcacctgctgtatacaaagtgttggggaattgacccagccaaacactctccctgccctggtggaacctatagcctggaggggaaagagacatgacataaatcattacaggtgggaggtgagctcctggaaggaaagtattgtatagggtgtgttaggaatcctaacaggttagggaaagccaacccattggcagttgggggttctggacatggtgcctggaaggcatgctccttaggacaggacattttggttgagacacatggaaccgaaggaacattgttccaagtgaggcagggaacggaaaatccatctaggtggagagggaagacaaaagaggaggattccagagaggaaaagaacatgttccaggcccagcatgagaaagcagtatgtcctgggtccaggggagaggctggtgtggctgcagcgcagggagcacgggagaacgggaaggcaggtggggagagaaggggcacagggccgcccagggtgtgcagtgagtgtggacttcatttggagggcagtgggaagccactgaaggaatcccagaaggagtgtagtgggtcaacgttgaatcctggaacacccatttggctgtggtgaggatggtggttgtgggggggatgagaaggggattgggaaatcagtagggaggctattgcacaggcctgggtgagaaagggaggtggagtggactgggaaggggcagagaggatggagagaaaaggtcaaattcacgggacatttgagaggtggtattgatgtggtgggctaggtgtggggtaaaggaaagggaggtgtcagggaccatgcccgggatctgacaggcctttcagagggattccaagggcctggggctgtctcctggctcatggccatgaagcttggagaagaagggattgatgggggcagagatgctaagctctttctgggacttttcacgtgctgctccttctgcctgaaacacacccctccaccctcagagtgtttcctgcgttgtactttgatcactatcactggtcttgctcccccactaggctgtgagttccccccaacctgcccccaaaacagagcccttgtctgcaaatcaatattcccatgcttgatccagaaagagctcaacgcatgtttgttggatggatagaggaatgtgggatgaggggtgtgggtactggtggaggcatcagcttggggatgggacaggtggacaggtggtctgtgaaagtttggggtcggtggctcaccaatgtcccagagcagcgggtcattggcctccatctcccggcgcccgatgacataccagatgcaggccatccagtgggcaaggagcgcaaagaccgacatgagcagcgtgagcaccacagcactgcactgagagtaccgctccagcttctgcagcagccgcagcagccgcaacagccgcactgtcttcagtaggtgcaccagcgaggtctgcaggaaggtggcgggggaggctgtcagcaggcacacctcctccgagccctcagagtcccctcccagggccttcccaccagacaacctggagccagggcaggctgcaacaggaaagacatctttgctgtcctgagaaagtggccaaggaatgcagcagcaagggaataataacaataaaacaaacagtggctaacactttgtaattacttttttttttttttttgaggtagagtctcgctctgtagccaggctggagtgcagtggcgagatctcagctcactgcaacctctgcctcccaggttcaagcgattcaaggctgcctcagcctccctccccagctaatttttgtatttgtagtagagacagggtttcactacattggccaggatggtctcgatctcctgaccccgtgatccacctgcctcggcctcccaaagtgctgggattacaagcgtgagccactgcacccggccttagtaagtacgttctatgtgcttagccaggcactgtgctaagcattggtaatccttatttaacaacacacacacacacacacacacacacacacacacacacacacacacttatacctttagttcaattatcatcattcctaatttgcagatgaatgaactgaggttcagggaggctaatgacttgttcaaggtcacagaccaaggacacgatagagttggaactcagggtgggcatctgggctgactgacaccacagtccaccttgtgctctacagccactaagcactgggagatggtaggggagccggccctagtcagagtcaggggataggcaacagtctctgcagagccccagtagcgacggcagcaattgtgatggggacccccctttaagacatggagaagcatagtggagtggggacaggcaaggacttgagggctgggggaggtttatggacacttcttcttgtggatcggctgcagatgaagagtcaagcagaagagttgagggggcaggagagcagggactgagggaggctgggctgtgctaggggttgacggagataatggtacctggtaagtgtcccatattcactaatattaccccaagtaccatctgcattgtggttatcaatattgattagcccttcaatcttggagatgggcagggcttatcttctgggtgggagcagcctggcagctaggactggaggctctggggcagtgcctggggaacttggtatgaaagcccctcattgccccttcctgggcctccaggaacattccccacagccctggccctacactgctcctggaccacctcgtgcaatttttctctaattttaggtgaaggaactggaaaggaggtggctctgattcctccatatggaccctcgccagggtttaatgcctacccccagctcccagagcccttgactgcaagcttgagttcttcagggcttccctcagtcagctgcccttgggccactctcttggggatactcctgtcattctccttggactagaatatccaggcctggctccttcaagtctgcagctctgccagtgcctgctcatcttctgtctctgctctacctctctctggcccccagtggtattcctcatctcaccagaccatccactcaggggccctggttacctgggaagcagggtggtatgttggaaaaaatactagactggaagtttagcgatctggttctttttttttttttttttttttttttttttgagacagagtccctgtcgcccaggctggagtgcagtggcgcaatctcggctcactgaaagctctgcctcccgggttcagaccattctcctgcctcagcctcccaagtaactgggactacaggcacctgccaccacgcctggctaattttttttgtatttttagtagagacaggatttcaccatgttagccaggatggtcttgatctcctgacctcgtgatccgcccgcctgggcctcccaaagtgctgggattacagggtgatccactgcgcccggccaagctggagtgcagtggagctatcttggctcactgcaacctccacctctgggactcaagcaattcttgtacctcatcctcccgagtagctgggactacaggtacgtgccagcacacccggctaattttttgtgttttagtagagaaggggtttcacctgttgcccagggtggagagacctggttctaatatcctgcctgcccctgctaggtatgtgaccttcagcaagtcactgaacctctctgagcctctgtacctacctctgaaaaaggataagcctctgccctgaagggttcccgtggggctcccatgtgatgatgagtgtgaaagaacatagggaactgtaacgtgctcccaaagggacctgagaggaggggcagggggctctctgtagtgtcccactccccagctgatggtgcctggtgggcatagaggggtgggcgcacccctggggaggggtagggagatctgctcagaatggtcagagcctcgaggcagacgtacacacatgcacgtgtgtgggagcacgcacacacgtgtgcacagccaggagaggaggcccacagcccgttggcggctagttaaattcggctgcgtgtaggtggtttcctgctatagctgagtgcagggagagagcacacaaggaaactgctccccacttgcccgccccacacccaagggggcctggggacacggggtagcactgccccaccctggacttgagaagacctactatctgctggctggggccacagatgaccactcagggcacctccagagtgtccccagggatctgtgaggactcaggtcctggcattctttgcctctgaattcaccccacagcctctaccttcttgtctaggtttactatgctcccccaaatgcttgctgtcctcatctccttccagctaaatcctactcaccctttaaggtctagctataccatctccgcctccctcaggaaaccttcccagacccctccagcctctgcccaacaagggcgcttttgcttcccaggtgctggccagacttcagatcatttttacacacactcatgttccagcctggaactccaaggtcagcccagcccctctgtagcatacccgggccccatcttccacccccattcacctcttctgtccctgatgtgctctgtggcattcctgccccctcaccagtttggctgtttagaggctgaatccttgttccctttccccacagtggccatgccccacacagtgctttgcagacagctaaatgctcatcagttgtttgttaaataaaaatgtgaaaagtaccactcatttggcatcagaccaatgccgccttggtagccatagttagcttttcatttgtctcagcttccctcaaagattgtgagctgagctccccaggatcacagaccctcgggatcctcccagtacctagcacagggctatgcccagagcaggtgcctgataaatatctgcagatggattgatgggaaggggcatatctgggtttggggtcagtcccttcctggaagatgctgtgctgaagttgggaggttggactggatggcgggatggaggtcactcaccacggtgatgttgaagatgtaaagcaggtcaaagggcagagcagcaataaggtcgatgaagaaccaggtggccaggtagtggaggccaatggaacgaggagcagagattacctggccggactgggacacataggtggtgcggaagttcaggatgatatctgggggtgcaagaggctattactggggggccttggcaaaggggtcaagaaaccgacaaagctgggaacaagctttggagactggaggaggaggcaggcatggagagatagattgggcttctggctggtccttagggaggataggttacaaggctgaaggctgcggggagcaggacacatgggccattgggacttaaagatgcagaaaggaaggggctctgaatgtctgggtcatgtgggccccaggagtgggtgaggcttggccaagtggatccccccagccgacccaccagggtgggtgaggcagaaggtctgacctaggatgaagagcatttccacggcgatgtcgctgacaagggtgtgtcgcgaagtgatgggggtgtcatcgtcacccgagaaacagacattgtaggggacggtgaccgcaacgtagaaggtggcaaggaggataaggccgtcccagatggccttggagacgctgtagtggaggaggaggcagcgagacccccccacggaggccaccttgtactcgggcactgatggctttggctcaaacacgttctaaggggagaggggtggcggttggggacacttgagggaaagaggagccaagatggggggtgggaaaggcaggggatggggaaagttagcaggtgggcactgcaagggcacttttgaccatgaatgaaaggagatagaaggccaggagaggggcgcagaggctgacacctgacattttcttctcctgccaagtatttcccaggccctcctccttttttttttttttttttttttttttttttttgagatagggtcttgctctttacccaggctggagtgcaagggcatgatcttggctcactgcaacctccacctcctgggttcaagtgattctcctgccacagcctcccaaacagctgggactacgggaacatgccaccacacctgactaatttttgtatttttagtagagatggggtttcgccatgttggccaggctggtcttgaactcctgacctcaggtgatccacccacctcagcctcccaaagtgctaggattacaggtgtgagccactgtgcccggccccaggcccctgtttgaaccaatcatgtcttgtcaagggtatttatgaggcttgacattcacccaacttgatttttacatttttaagtttagagacagtctcactctgtgcccaggctggagtgcagtggcaccatcataactcactgcagccttaaactcctgggctcaagctatcctcctgcctcaggctccagagtagctgggaccacaggcatgcaccaccatagccagataattttttttttttgagagtttcactcttgttgcccaggctggagtgcaatggtgcaatctcggctcaccgcaacctccacctcccgggttcaagtgattcttctgcttcagccttccaagtagctgggattacaggcatgtgccaccatacccatctaactttgtatttttagtagagatggggtttctccatgttggtcaggctggtcttgaactcccgacctcaggtgatccgcctgcctcagcctcccaaagtgctgggattacaggcatcagccactgcgcctggcctccagataatttttaatttttttttttttttttagaaaaggggtctcactatgttgcccaggctggtctagaactcctggcctcaagcaatcctcctgccttggcctcccaaagtgctgggattacaggcatgagccactgtgcctggcccaacactcatcctacttgagaagaagactatgacaaatcggcacatgccctagcttgaggggtacctaacttctcccttaagttcctcttgggttctgggggcccagtgggggctgggtatatcccagcagggagcagaggctggcatagcccaccgcattccctgtatccctaacagagggttggggactcaatcccctggcttggtcaggatcctaggaggtggtacacaggtctagatgccaggcctgcaatgagggctttctccctagaactatagcagcttgcaatttcaccacccatggtataaccctatcacccccgggcaggtgaggtcattgctgctagagcaatgtgacatcatcggagcaaagtaatgtcaatcacctaagggaatgagggagatagggatagaaggatgttgggggaggatataggatggagcatataccatatagagtagtatatgggaaatgggtgggcagaggagcaagccaaggagggacaccagacagacagggaagtggggagacagtggcaggggtgcctcagaatcaaggctggaggacttgggagatgttgggttgggggtgggactcacattattggccttcatgcctccctggccccggcggccaaagtggccggtcagtcggtgtaggacagtacggctccgtcttctggcagaccgaaatttccaggtggctccccttctaccaagggagttttctgttgggaagaaaggtgcagagatacgttggggcacatcccttgcggctggttaggcgaaggcttctgaccattcacactgcccgtccggacttgctgttaccgtgattactgtccccgcggcctccttgggggccaagtcctgggcttccactctgagtgatatccttgaaggaaaagaggaacagcacgacctcccccatctcattcttgatgggcatcatgtccaggaggcaccaaaaggctgagcctgtaggcatggagagagggaagggaggagcatgggcagccccatggcatgcctttctcctcatccctctcatcctcctagacatagttaagagcttggcaaagcaagaaccaaaaggaacctcagagattctgtcagccgattccttcatctttcaaatgggggaacccaggaccagagaggtcagggatacgctccgtcacagtcagcttttggcagtgtggggacaagcactcagactcctactgtgcccagtgccctctggataaggctaggggtctaggcagagctgcagggtggggtgagccccctcaccatccttgcggtagaagcagatttcagcccggtgctcctggtggccctccagggctttgtgcagacgctgcagggctggctcactggtctctgggccgtagaggaaacggcagctgcaggtcttctgcatgacctcggtgcgaccgtagcctgtgagctcgcagaagccgtcggagcagtagacgatgggaaagccccgtgtgccctgtgcgttggccagcaggaagttgctgtctgtgggaagaagaggtcaaggtcaggtcaaggctgggaggcgagctagcttccaggtgggcagcacttcctctaagttggggttagaagtcacagagccagaagcttcccaggtttccatgttgctcctgaccccactttgggatattctgaattgagaattggagaagttggagcaaagagacaaggacttgagacaggacttaagcagggtctaacggggagttggagaaggaccccaggaggtcatgccatccatccccctgccttccaactggtgagctgtcactgtagaaggcagtatagcatggtgagtaagagcctgggctcctgcaaccctccactgccacttactaactgtgtgaccttgggcaagttgatgacctcttctgtgcctaagctttccttatttgcaaagtagggcataataggccttcctcacatggtcgttgtgagagttacatgagttaacttggggagaacaagtcctagcacatggtaagtgctactctgagaaggtgaaattttttccccacattcacttggctttcttcctattacagagtaagcagggcagagattctgatgacaccacacccatttattgataggaaaccaaaaggcagagattatccaaactcacagatctccttagtgtgggggcagacagtgatgagtgctgtcttccttccctgccttccagagaaggtccactttttagcattcttgtagctgctttcaggggatctgccccactgctcaaagtctaatgggagagggcattgagcgtatagctccagcaacccccagcagcagaacccgagctgtctccctccagctccaatgggtgggaggccagggggactcctgtgggccatccagggacagagactcagctaagagatggggcctgtgacacaaccagtcctggtgctctaggagggatgactgtctgggggcagggaggctgatggggacactgaaggtgcctgggaggcactgggctctgggcacagcctccttcttccatcccagggcctgttgccccggtgatgggcgctatggaaacaaggtggtggggaagagggtagggcccggcggctcagtttccgccctcgggtaccgctcccccaccatccagatcccggccagggttcccgagggaatggcggggttgggggaggtgagggcggggaatctctgggttccagagtgggaagagggaatggcgggagaagaggcgggggaggagtgatgtggctgtccaaggtgctgaacctgaaacccaagctacgttgggcgagctgggagttcccaccgtcgcacagaccgctcccctcctcctgcctcacccaccttagacactgacgccccacgatttgggggcgcgcgacctcaatccaaactaggtcctgctgaagtctgatcttttctcctttttttctggaggtagtgggagctggagtctgtgagtagaccccagaatgcccggccactttgccccacttctgtgtctcggatacccccatacacgcccccagcacagctctgcccgagagtgggcggctccgaaggaccctcctccgctctgccgcacaaagagcctcttctgcctcgagtcacaccccctaaccttggcccccgtgctctcggccctttcccctcctcccctcgcagggcactccccgccctgttcctgcaccgcggctttgggagttcctagacccgcacctccattctctcccctcgcctcgggtctcaccatgtccaggagatccgagacggccccgaggatacttgccccccagctcgaacctcaagccccgacctccgtcccactcacgcgttccgtcaaaacgggtggcgatggtgtccaggaaggtgttttgcggggccagcaaccccttcatgaccggcatggccccggggcgtgggttcaaggcgcggcgctggggagctttcagcgcggccgggccggagggggcgcgctgtcggaggggccggggcgccccatgcgccctcctgcctcctcccctccctcttactgccgctgccgctgccgctgcctctgctccgaaccccgtagctctcggctcggctcagcgccgtttcggtcccccccacctccccacgggccaggttcttcccctcgggctcggcccgcacccgccacgtggccccacacggggaggggccgctagcgacacccgcacccctctgggcagccctcctcccagaggggagcggcccacgcgtgtctctcggggagagaattcggggcacgcccaccgggaggggaggcctgaaatgatgggcggggcttgaataacagacccgccctcttccaggctggccacgcctccacacgtggttccctggctgctccttgtggctccacctcgcgggttttcccgcgcggcgtccacgctgggctggtgtctggttcacagtgccgcctactggagttgacatatttcgcagcacccacaggccagtagctccagcgtgagacagcaagggttaagaggctagtttgctggtagagaatggacaatgggaaggcttgaaaccccaactctagaaagcaccattcttacctcctgcctcagttttcccaagacaccctggcgaactctgcctactgagacacagcatggtggaatgaaaagagctttggagtccaccaggtagagtcccagctctagacaccaatcgtgtgatatcctctccaagcccactttcctcatctgtaaaatggagctgataattcttacctgatgcagttaccgtgagaatgtaataccataatgcatgtctttggtacaaaataagtgtcttgaagggcagttgcctgcctgttttccctcttcctactgtcttaatcctcctctctgctgcccttcaagtggaagagaggctggaggcaagtttgggagaaactacctctgaaaaagatagtttcgaggtgggcagagtcatggcttgcaaatctccaaggatgcacatgtgaactttgacctctaacttctccaagatggaaccagtacagcagcaagagggaccaaagtgagactagacacaggactttctcactacctatgcagaaaattgaggcagctgagttctgtggctgagggtggctgcttcccacgacaaaacagctgaagcagtgaaagtgggaaccctatgggcaaggagggcaggctaaattctccccaccctctgagctaggtattatctgggatgttagattgctaagaagtgccacatttttctgtgtctctacttttgttgttgttgttgttcttgttgttcttgttcttgttgtttttgagacggagtcttgctctgttgcccaggctggagtgcagtggcatgacctcagctcactgcaacctctgcctcctgggttcaagcaattctcccgcctcagcctccttagtagctgggatcacaggcgtgcattacaatgcccggctaatttttgtatttttagtagagatggggtttcgccatgtttgccaggctggtcttgaactcctgacctcaagtgatccgcccgcctcagcctcccaaagtgctgggattacaggcatgagccacggagcctagcctgtgtctctacttttggatgttatattagtttcctaggactgccataacaaagtaccacaaagtgagtggctcaaacaacagaaacctattgtctcacagttctggatgctagaagtccaagcaaggtcaggtgaagagcgttggttccttctgaaggctatgagggagaatctgttgcatgcctctcccctatcttctgggggtgggggtgctggcaatttttggtgttccttggcttgtaggagccaatctctaccttcatgttcacatgggttctccctgtgtgtgtttctgtgttccaattcccttttttataaggacgccagtcacagtggattagaggcccaccctactctagtatgacctcatcttaactaattgcatctggaaggaccttatttccaaatacagccacattctgaagtgccacgggtacggacttcaacatatggattttgggaacaccagtaacaggtgtctttggctggagttgcagtaaaatcttgtactgcccctgcttaagaatgtcccatgactctgttacctacaagataaagtgcaaagcccgatgatttgtgagagcctttgcgagctgtgctgcactgactgtaactgtgtcccttcctgagcctctccactccccacaccctataccccatgatgcagccattctggatgactcattgttgaagttcaaattccctgccttttcagcaggattgactcccaccccttcctagctggattctgctgctctatgcagcttgcctgccttccttccttccttccttccttccttccttccttccttccttcctttctttcctttctttcttttcttttttctttttctttcttttttttttttttttgacagtgcctccttctgttgcccaggctggagtgcagtggcccaattatggctcaaactcaaactcctgggctcaagcaatcctctcgcccaccataccccgctaattaaaaaaactttttggagagatgtctcactcactatgttgcctaggctcgtctcgaactccttgcttcaagggatcctcctgctttggcctcccaaagtgctgggattacaggcgtgagcaccgcgcccgaccgctgcaacctttcttgctttccttccccttccgcgtctctgggtaaagtccccgctacagaatgcctagcagagcatcgtaggagtcccgcatggcccgatccaagcatgcacctgtgcagttctctctgtgccccagggccttgcactgggaactccccaaccaagagtgtttccgattcaaccacgcaaaagctaaggctggtgcccgacagccgggcttccaggcccagctgtcctccgcaagacgctttgccaccccggatgggcaggacgcgaccgcacaggaacagagaccagtcacacgaatggagactcgtctttattgccttttttctgggggctgacgctgggtgggcagagggcagaggcctgggccaggacagggcccgaagaacgactcagatcccggactgtcctccgggcgcgacggaggcggcggccggggcggaacagcggcgcccgaggcaggggcgcggcgctggctctgcgcctgcgcggcggcccatggtcaggatgcccgcggcgtggttgccgctggcctgcaggaggcgctgcagccgaccctggaggcccgggggcccggacctccgcttgcccagcgtgaggatgccggccgcgtgattgcccgcgccgtgcagcagctcgtagaggcggcaagagcaagtcttttgacgacagcagtcgggcaggggctgtgcagccgccccggacgacaacagcgcgggcggcagcagcagcagcagcagcagtagcgtcacggcggcccaggagacctagggagacggagacagggcgctgggggggtcttcccacggcgcccgccaccagctcccacgcccaggacctgcccctctggctccgcgccccctccaagcctgcactcctttctggctgtcacttagttctccttgctttgcgcccttgctggtatcggcctactttccctgctcctccttcaagacccagcagagcatctcccccaggaagccttttgagaccccctgggcagagtgaatcccccttttctctggagacttaggccactgtgccaccactagggcacttgccactccacctgaaaacaggagtgtctgtctgcagcagaagttgtaaacttgggaaaaacccgggccctactgagtccccccaacttcctctccacagcagggaaacacatggaaatcaggaactagcaagactccagaatgctctctcatctgcctgcccccttgcaggagtgactgaactccgttgctttgaaccagtttcctgccctttcagagggcacagctcccttacctgtaaactgggtatactagaaataatttctactctgcaaggctgttgggaggatgacaagagatgacaggtgcaaacggagcacctgacacatagagctcagcaaacacaggctcttagcaaaacagcacccaacccaatgtgagccaaggcaggtgctcctgcctcagagcacacccaggaaaagaccaagagtggagacacctttggcctttcttccagccctctgagcaagcactctttttgcttctctgggatggtgagtcacccctccatccctggatctttacctttgtggaaggaaggttcatggtgtctggcgctcagggtggggtagccgggaaaggagatgtctgtggtggttcaaaaagccaggaaccttgaggctgtcaattgtgacccactcccaggggtctggggtttatagtgctctgaggtggcggggaattgacaggcacttgcgtccacacccaggccagacaaaggcaagtctaagattagcctgctgcaggggggccgtctccaggctgggcccaaggaatggccgctgcggcgttcagaggccagggttggatcactgtgcccctgatcacccccttgtctgtctatctgctccctggagatggggcggtctccgggcactaatgaggccaccttgcacccaggaatctgggagcacaaaagaggcgctggcctgggacaatatggagggaggcagctgctaattaggggcgggagagaggcagacgcgagaccccacattatgtgtgtggggggtggagcagccagcagcagtcctctccctcccctgcttcttgtcgctgctcctggggactgtcaggctccaggaccttcttccttcatggaaaggctccttagctgccccctccccctagctttttttctcccttctgccctttccactagcctctgagatggaaaaccttgaaaactcagcctagacagtgggaggtaagaagccaaaaccaagcccaatttctctttctttcttttctgtgtgtgtgtgtgtgactaaattttggtcttgttgctcaggctggagtgcagtggtatggtcatcttggctcactgcaacctccgccttgggttcaagcgattctcctgcctcaacctcctgaatagctcctgaatagaattacaggcacacgccaccacaaccagctaatttttgtatttttaatagagacagggtttcaccatgttagccagggtggtctcaaactcctgacctcaagtgatccacccacctcagtctccaaaagtgttgggattacaggcgtgggccactgcaccaggcccccccgctttttttttcttccttccttctttccttcttccttccttcctgcatttctttctttctttctctctctcactctctccctctttctttctttcttcttcttcttcttttttttttttttgagacggagtttcactcttgttgcccaggctggagtgcaatggcgcaatctcagctcactgcaacctccacctccagggttcaagcaattctcctgcctctgccttctgagtagctgggattacaggcatgcgccaccatgcctggctaattttgtatttttagtagagacagggtttctccatgttggtcaggctggtctggaactcctgacctcaggtgatccgcctgcctcagccacccaaagtgctgggattacaggcatgagccaccatgcctggccttctctctttcttcattttcttttctttttcttttctttcttttttttttttttttttgagacagtctcactctgtcgcccaggctggagtgcagtggcgcgatctcggctcactgcaagctccgcctcccgggttcacgccattctcctgcctcagcctcctggcagctgggactacaggtgcccgccaccacgcccagctaattttttgtatttttagtagagacggggtttcactgtgttagccaggatgttctcgatctcctgacctcgtgatctgcccgcctcggcctcccaaagtgctgggattacaggcgtgagctaccacgcccagccctctttattttctttcttgagaaggtttcactctgtcacccaggctggagtgcagtgggacaatcatagctcactgcagcatcaaatgccacggctcaagcaatgctctcacctcagccacccaagtagctgggaccacacagatgcatgccacaatccctggctaatatttaaatttgtttgtagagactgggactcccaggctggtctcaaatccctggctcaagccatcctcccccttcagcttcccaaactgctaggattacaggtgtgagctactgtgcctgaccaaactcagtttctaccagaggctgatagaaagcttctacctccccagctttctccctggctcaggctacctggaggggaggaatgtagtcccactctacagtcaacacggagtgagccgccatgcattgaagaacacatgtcatctccaggcccaagcttcttattcacaacctcttttttttttttttttttttttttttttttttttttttttggagatagagtttcactcttgttgccaaagctagagtgcaaaggcacgatattggctcattgcaacctctgcctcctgggttcaagcaattctcctgcctcagcctcccaagtagctgggtttacaggtgcacaccaccatgcccagctaattttttgtatttttagtagaaacacagtttcaccatgttggccaggctggtcttgaactcctgacctcaggtgatctgactgcctcgacctcctaaagtgctgggattacaggcatgagccatggcacctggcctacaacctctttattgagctcctgctgcatgccacaccaggcactgggcatgggggcaattgtgcacaggatctagcccagtttccaaggaactcatattccaggtgggaggcagttcaggcataatgatagttcagtgaaggagaggactactgcccacatgagcaaagctgagccagtcactctgcctggggtgggcctggtagggggtcctcaaaggccttgcatgaaagctagtttacatcaggggcagcgggatagagggcattacatagaagggacaacttgagcaaactcctggagttgacagtgcttaacaacccttagatgggaggtgaggcgtggtccttagtccaggccttctttcaagcaaggggagagaggtagctgcacatgtaggtgagggccaaggtcaaagggtctaataggccaaattgattggtcttaatcctgtgggcgatgggggccaccatgggaggtttttttttttgtttttttttcccgagatggtctcgctgtgttgcccaggctggtcttgaactcctgggcatgaaccatccttccaccgcagcctcttgagtagctgggactataggcccatgccactgtgcccagcttcacaggaagattttaacaggatggagtgacaggcggaggtgggggccgggtgggtatgcagccaggacctgggtgtgggacatggaatggagaagctattcagaggcatctggatccagtgctgcctctactgaggaggagctgaggtctgcccctcccatcagcctccaagatggaaaaccttaaaactccagtccaggcagtgggagggaaggaagccaaaatctagcccagtttctttctttcttttattttagcctctacaaccttgtggaggctgcgtttcctcattagtatggaacagtgaacccagatggtctccggagttgcttcctgcggcgatgccttatgatgtgaagtaatagctctcccttccccaccgcagaagtggtttgtgggtgctggcctaggatgtgccacgagtcctccaaggctcctgtgtgcgcatgcagccttgccaggcccagagcagaatgttgggggaaagtcctggagctcagtgggggaatggctgggccggggtccactcccgtttccccaaagcagaccctgaggcaagaatctgggtgcaagaggtttatttgggagccatcccaggaagcccaaggcgggggagtggggaagagagggaagggagagcccccgcaggaagtacatgaatgagtgggttactgctgcgggcaactgggactccatcctgctgggcatcctctgagagtttatgtagaatacacttcagaattgtcctgctcaaggacaatgaagctgaggtcctgctccttattgactcagggttgctgctcctggggacattaaccccccaacacttctagcttgcccagtgcactgactgagcacacagctgtggccaccagagaacctctttgggctgtgatacaggaaaccatcggtgtgcatggtaactctctagcagtgtccttcatgccgggacatggggacacgggcaggcactgctggcatctgctaaccccggaggcccatacttcagaaccggtcagctgggccaaggcctctctaaggcccagcggctctcatgggcaaatgtcaggtgacacagagtcagagaccctggccaaggactccccatccggagaggtcccagagggaggggcgaggtggcctctggggggagctgggcggtggggcaggacttgactcaggacaccaccctctcctgcagacactgggccaggtgcctgtgccgaaggacccggggcatcgcaggggggaagggggaggaggggcaggcagcgagggctgcccggagtgctcggaaggctccctgccccaccaggtggactctggcagggcccacgctgccccagaaccgcagggacttgtagcggggagaggcttcctgaaggcagtggtccagctgggaacagaacagcctgagtgagctggtgtgtgactgtgagtgtgcacacgaggcgtgtgtggctgtgcccaggctacatgtgtttagaagttttgtgtggacaggtgtgtgtctgtgggacttagccctcccctcccagagccccagggagcttctcctccgccacccctctccttcccatcagccctgatctccatggcaccctgggagtgtgcagagtgaaggggtctacagtcagaccctgtcctcgtctcctttaccttgtctcgattttcctctgacagattcctcagccccctcagcgccacaaacacctcgtagtggggagcagagcccgcagaggaatctgtgaatagaccccatgtgcacacatacttccggtgaatgggcagctgccaagtctagtgtcctctgccctatctgttcttccccactctgagattcatagggaaaaaagagtttcttggtggggagtggggtaaatggagaggaacctagagcttgatcctaaataggagacagatcaggaaagaaaatgggtagagactgcagcaggatggatgagagttagatgcagagaaggacttttgtaggagtagtaaaggaggcttatctctttcctagcagtcccctggcaggggaggtaggagttgaagggtagctcaaggatggtaggcaggagccggtggggaggctcacccagaatgctgctctccacacagccatggtccagcagcttggcccccgcccactgccccactgcccggcccagggcctcagagaacaggtcttcaccaatatcttcccctcgcacactcagggtctggtccagcctgaagaggaggaagggagaggcagtggagcccaggacacaaggatggcccttcagctccccggggtcacctacctgcagatgaacctgacgactggacactgattgtaggcaccaaccactcgcaccacatcacccaggcggcacctgatggggtgcaagtgggagtgaggtcgggcccaaggtcttctgagctcatgccccaggcccccagcacggtcccatagggccccaggtagcaggggctgtgcagctgatcacctggtgaggctggcgcggtccgtcagcaccagctcatactccttgccctgctgggcctcggccaaaaggagggtggaggcagcttcctcctgggtgccttccttgactgggagcagctcgataaagggggccccagggggcagaaggtagagcccatggggctgctctggctgtaggtttaggcccagcacccctgtgaaagcaaagcagcctcctcagcgtctgctggtgccatcgctttctgccaggcaatagcccctcctggatcccaggcctgatcctctgagcacctgatcctcctgctgcccttccaccacatccttcctggctcccccagcctcagcgggctgcctcttaggccctcactggaaagaggcagagtgctgtggtcctggagggggcagacttgggagtgaatcctggtgccacatgaatttgtgcaagactctttttttttttgagacagagtctcgctctgtcacctaggctggagtgcagtggtgcgatctcggctcagtgattcagtgattcctgggttcaagtgattctcctgcctgagcctcctgagtagctgagattacaggcgcctgccaccacacctggctaatttttgtatttttagtagagacagggtttcaccacattggccaggctggtcttaaactcctaacttcaggtgatccacccacctcagcctctcccaaagtgctgggattacacccgtgagccactgccccggccttttttttttttttttttttttgagacagggtcttgctctgtcacccaggctggagtgcaatggcgcgatctcagctcactataatttctgcctccaaggtttaagcaatcctcccgcctcagcctcccaggtagctgggattataggcgtgcaccaccatactccgctagtttttgtatttttagtagagatggggtttcgccatgttggccaggctggtctggaactcctgacctcaacgatccatccaccttggcctcccaaagtgctgggattacaggcgtgagccactgcacccagctacaagactcttaacctagagagcctgaatttcttcacttgtaaaaggaggctgctggccctagcatgcagcttgttggggaggattaaatgagatgattatgtagggcccaatgcatggctgcttgtcatgtgaccactgaccgttgcccccacctcactgcccttgagtcccactgacctcccgaggcagcataagcaggagagaagaaggctagtccttggcaccacaaggccccgagggcagccacagcctcggcctggcctcctgcatccagagtcaccaccacctgcagctttggccagagccgaagggccagtccccgtggcccctgctctagggcctcccggagctcagctgcccgttcacggagaggcgctccagggttcccggcagctatcgccccagctagctcttcaccatcagtctccaggcccaagaaaacatccagaagttcgacagccgtcccagcctccagtgccctcagccctggggacctcagtgcgtccagcagcagggccctagggtccttggttccaggggtgcccacctggcccagggtattcccaggccaaggcaggggtcggggccaaggggatgtaagcgtcacacgggcagtgcgtccctgagccagcacttctgggtaggccttgtttagggctgccagacccagcaaggtggcctggaggaggaaagagagaatgttggtctggtgtcagagccagacccagagcccccatttgggggttctttgcccaccatgactggagggtttggctgcaagtcagaggtctctggtgggactgggctgtggccaggactgggctctggccatcctagattacctgcagagaggcctccccaaggtcctggtttgaggtcgggggcagtggctgctctccactgtcttcctgctgggtctggctggccttggtcagagggagatgattccggaaggtgcttatgtctatagccccaatgacaacagaaacgcctcaggaagccagtttcccaagagtttcaggcaagactggtgagacccttgagggaggaaccgagaataggcctggggtagagaggatgtaaggacccagcatgggaaattcatcttggacaagaaagccagtcctgggtctctgggtcaggccactccgttggcagtggaggaggtaagggggccatcaggctctggaatctgacggtcctgtggggtttctttctctttgggtcacctccccagaccctgggaaacacacctgtgctccttctgagggaacagtgggggcgctgggctccctgtagacaccacctcagggcctgctgctggctctggtgcacatggagcgtgctctgctccagcctccgccgctgccaggtggctgcccagaccagggccccccatgccactcggtgctggaggccagcaagccaggacagcctggcatcctgggaccgctgctgcctgagcagggccaatgttggcagcagcagcagcagcagcagcagtggccacagcagcatctccaagcagctcctgggaagaggaaggaaccgagatatgggggcatgcagcaattatccatttctcctcccacgctctactgcatacaggaaaaccgaggaaaaatgaaattgggaagaaggcaggaccctgtggggcaggtgatgcaaaggagagactatcaaagctttggagtcccactgacctgagtgcagatcctgcctctgccgcttgttagctgtagggccctgagcaatttagtgggctgcactgagctctgtttcctgatctgcaaaatgggaataagaataagaatgcctctttcagaaggtaggggtgggccgggtgaggtggctatcatctgtaatcccagcactttgggaggctgaggcaggagaatcacttgagcccaggagtttgcaaccggcctgagcaacatagggagactccatctctacaaaaaattgaaaaactagcccagcgtggtgtcacacccatagtcgcagctacttgggaggctgagatgggaggatcccttgagcccaggatgtcaaggctacagtgagccaagatcgtgccactgcaccccagcttgggcaacagagtgagaccctgtcaaaaaaaaaaagaaaagaaaaaaaagggagaaaagaaggaagaggaagggaaggtacaggaagggtttcggacagggtcggtcgggcacacagcagctgcgtaacgatatctcttgcccactcccgagtggctttgctttctctcgggatccaccctgtcccagctccttgtccctcctgagccccaggctgtggggtccatgcccacatgcacctgtcacagcccacttctgcctactcctggcacgtgacggagacccctgggtgactctgggtctcagcacacatccggccagaaagaaggagcgatggctttaaaaggctgggccccaactgggaaatccggccaccaggcctgagggaggagctgaaggaggggggtgctcttaaaggggcaggtcgcctacaggacttcatgtcgggtgctagcccaggctggcagttggggcagttaggaccagactagcatggtcctcaaacttgcgcaggtgaaggaacagaaaggtgtgtgtgggaaagaacgccattaagccacttgagctgggagaggggcaagcttaagaactcttaaaaccccaactcagctgggcgcggtggctcacgcctgtattcccaacactttgggaggctgaggcgggtggatcatctgaggtcaggagtttgacaccagcctgaccaacatggtgaaaccccatctctactaaaaatacaaaattagccagatgtggtggcacatgcctgtaatcccagctacttgggaggctgaggcagaagaatcacttgaacttgggaggcggaggttgcagtgagctgagattgcgccattgtactccagcctgggcaatgagcgaaactccgtctcaaaaacaaacaaaacaaaaacaacaacaaaaaaaaccccatcctctccctcaaggtagttgagaaagaaaacaattttattattgaataagcattcaaccacaatgtgatgtacatgacaggtgatctgctaagagcttgcaaagaagggaggaaatcttacttttttgtatagccaagcgcatacaacccattacatacacgttttcaagataaacaataacgagtcctcaagtaagaggacttgtcacatatagtttatcttttttttttttttttttttttgagacacagtcttgctctgttgcccaggctggagtgcagtggcacaatctcagctcactgcaacctccacttcccaggttcaagcgattctgctgccccagcctcccaagcagctgggattacaggtgtgtgccaccacgcccagctaatttttgtattttcagtagagatggggtttcaccatgttggccaggctggtctcaaactcttgacctcaagtgatctaccctccttggcctcccaaagtgctgggattacaggtgtgagccaccacacccagccagtcacatagtttatcttaactttacatggttattaggtgaacatctgtgttagcttgctggctttatcccaaggaaaattacaaacttctttttttttgtttttttggcagagttctattcttgttgcccaggctggagtgcaatggcacgatcttagctcactgcaacctccgcctcccagattcaagcaattctcctgcctcagcctcccgagtagctgggattacaggcacgcatcaccacacccagctaattttttgtatttttagtagagacggggtttcaccatgtcaccatgttggccaggctggtctcaaactcctgacctcaagtgatccacctgcctcggcctcccaaagtgctgggattacaggcctgagccactgcacccagccagtcacatatagtttatcttaactttacctggttactgggtgaccatctgtgttagcctgttgcctttatcccaaggaaaattacaaacttctctttttttgttttttgtttttgagacagggtcttgatctattgcccaggctggagtgcagtggtgcgatcatagctcactgcaacctcaacctcctgggctcaagagatcctcctgtctcagcctcccaagggactggaactacaggtacgcaccactacgctcaactaattttattttttgtagagacgagagagctccctatgttgcccaggctggtgtgttcttgacctaggctctcaaaacactaaaaccactccctttctccccttacttgcctctggatacctttgagaagagagctactacttgctgagcacctctcttcccttcacagctgagcttctttcaacaggtctgttctcactctggctaactcacctcactttcacgttttttctcgctgagatcttgcatttgcttttattatttatttaaagacagggtcttgctctgttgtccaggctggagttcagtggcctggtcacagctcattgcaaccttgaactccggggatcaagcaatcctcctaccccagcctctgagtggctaggactacaggcatgtgccaccacacccagctaattaaaaacattttttttttttttttgtagagacagggggtcttactatgttgcccagactggtctggaactcccggtctcagcgatcctcctaccttggccttccaaagtgctggaattacaggtgtaagccactagacctggcccagtaacagctttattagatataattcacacaccatacaaatcacccatttagtgtacaattcaagatctagtatatccagagatatgtgcaaccaacaccacagataataacattttccttacctcaaaaacaaaccctgcagagtctctctgagcctactgtgcctcaggagactgcccaattcgttaaataaaataaaataaaataaaataaaataaaataaaataaaataaaataaaaaaccccaaactcaggctgggcgtggtggctcacacctataatcccagcactttgggaggccaaggcaggtggatcacctgaagtcaggagttcaagaccagcctggccaacatggcaaaacactgtctctactaaaaatacaaaaattagcagggtctggtggccggcgcctataatcccagctacttgggaggctgaggtgggagaatcgcttgaaactgggaggcagtggttgtagtgagccgagatggcgccactgcactccagtctgggtgacagagcgagactctgtctcaagaaaaacaaacaaaaaaaaaaacaaaacaaaaaaacccccaaaccctgtatcctttcactattacctccaaactccttcccagcctctaggcaacctcaaatttactttctgtctccatagatttgcctatcctagacatttcctataaatggcatcatataatatgcggtcttttgtacttggcttcttttctttttcctcgctctgtcacccaggctggagtgcagtagcatgatcacagctcaagtgatcctcccacctcagcctcctgagtaggtgggactacaggggtgcaccaccacatccagctaatttttgtatttttttgtagagatggggtttcaccgtgttgtccaagctggtcttgaactgctgcactcaagtgatccctcgcctcagcctcccaaagtgctggagtcccagtcatgagccaccgtgcccggcctggcttctttcatctagcatgatattgtcaaggttcatccgtgacaacatcatgtcctgtgtgtcagcacttcattcctttttattgccgtatattccattgtacagatataccataatacattttgtttattcatcagttgatggacatttgggttgtttctgccctttggctattatgcataatgctgttatgaacatttgtcacaagtgtttctgtacatatatgttctcatggttcttatgtagatacctacaagtggaatggctgggttttttgtttttttttaatttgagacagagtcttgctctgttgtccaggctggaatgcaatggcatgatctcggctcactgcaatctctgcctgccgggttcaagcgattctcctgcctcagcctcccaagtagctgggattacaggcgcgtgccaccacgcccagctaatttttgtgtatttttagtagagacggggtttcatcatgttggccagactggtctcgaactcccgacctcaggtgatccacctgccttggcgtcccaaaatgctgggattacaggcatgagccaccgtgcccggccctatttgttccttaagagccagctccaggctgggcatggtggttcacgcctgtaatcccagcattttgggaggccaaggcaggtggatcacctgaggtcaggaggtccagaccagcctggccaacatggtgaaaccccgtccctactaaaaatgcaaaaattagccgggagtggtggcgcctgtaatcccagctactcaattaaaataaaaaaataaaataaaaaaaaagcttgagttgctcagtggccttcctgcatgttcttttgcataatgactttgggatgccttgattgcagcaggaagcgatatcctagcataatcagttgtggtagctgcctttctccaactgtgagcctctgcagggaaggcaccatttctcatcccacacacaacgctgaactcagggtcaggtactctaaatgtgctgaatcttaaggacaggctttcagccgggcgtagtggctcacgcctgtaatcccagcactttgggaggctgaggtgggcagatcatgaggtcaggagatcgagaccatcctggctaacaagctttctggagtcaggaggctaggagaccatcattcttattttcaaaacatcatatgagcaggaaggtatgaaaggccccatctgccatcagagctaatgacgtgccctctgaggcagccaactcccaaccacccaaccagttccctttttcagggtcacgctgatgacttgaaacttttccgtgttcaagctgccctcccttggcatgtgacagaaaaaagtaaaaacaggactcaataccatcccttcagaggaaggctttattgtaacataaaatacacaactttgtgactgtaactctgcataggatatatttcttttttttgaggcagagtcaaatttgaggccccaaattgtacacaatacttttttttggtggctaaataactaatctgccttgacactaaaatatgtatctgaaataatttcaccaagttttaaaaagaaaaattataaaaagtatactttcattttaagttatattcgattttagtctccccctaccccctagaaaaaacctgcacatctcacacacggagctgaaacttttgaggacttgtgtgtgtctgggagtgggtgagaggctgatggggtcgagacacaccactacctttatcttgtggtttgcaggaacaaggaggagagagaagatagaacgcagagagcgagcacacctttcatcaaaaatctccactctctaggcacagcctcggtaacaccgaggacagctcacaactggacaagcagggaaaccccagctcagggaagccacactcatcagctctcttcctccccaacccagtgccaactgcaaagtgagccaggacggcctggctgctctgtcctcagcaggccctggggtgggtccactcccaacctgaaagtgtatcaagtctgaccccccaaccagggttgctggaacagagagcgaggtctcagaggcaggtgctggtgaagcatctctgggagacgggcagggagtgactctacgagcctggatccctgagcaggcaggctctccttctcacccttccccgatgcacccatcctcatggttggaattttcatcaaatcttgaggggtagggaggggctgagtgggatgcgggtagcctgctcctcagaggcagagagactctactgcctggcatagaaaaataaatcagtgtatgaaaccaagccaaggcaaacggcagctttaaaaaagtcatcttccaataaataatttactatagaggaatatttttaacggcaaaacactgataaattcagaagttatttttgtaaaaaaaatatgtttatttactctcatgtataaaaataaggtttttggggccatcctctcctgggggtgcccatgcccttcttttggagagggggccgaggggtgaccttttaggccttacccgtaagctattttaatacacctgctcacccccctcttcctccactacctgctgtagcccattccttccttctggtgtaaagctacagaagaagtcgtggaacaaaattataccgaggctttttttgttttgttttatacttttatcaaactccccagcaaacttgctgactgcatttccacacattaccaacacctgccaggacttcacagcagggtgacccgctaagcaagctggcctaggttcagcccacactgctgctacctactcttcaagacattaggtgtgaacagagaaggggaatgaggtgacctgggtttgaatgacccagggcccaatgcacaagagagaattttgatgtcaaattagggtggcaaggagaaaacaaaaaagatccaacttagaaacagaaccatgattcaacatttgcaaaaagcatcatcaataagcctgaagaaggccacggactgtgcatccgctggctcagagaaaggctgggcagccggaacagcagcttcctgggtaaccaggcaacaatctcagcgcctgggagtcagggctgcgcactccactctggccagaacacaaacggcattggcactgtaagctctcagttacgtggccctcttttctctcctctatttctccaaacatatgtgcacacccagaggaactgagtggcaattccagggtgcgggcgggcaggaggggagagaggacaaagagagaataagatgagctaaatgttttgtgaaaagccaccgcccatccgaaagcttgtgacttcccttgccccaacaatctttgtaggttgccccttttcccattcctacccaagaacacaggggtgggggagagggaaggctctctttgtcaaaaagcagttatctacatttcagaagaaaagcagagacaatcacggttatatatcaattgcttggcagacagagtgacgaagactcactggagcacatgtgctttctcctccctttgtccttctcttattcaaacagccacatgtcaaagtccagccactcttaagacacatggccaacttccaggcttcacgaaactcactgcctttttgcacaaagtaaaaaccaccacagcttctgtctgtggcccctctgctacaactaaactctcagacagtgagagggagaaacaccataacgtgcaaacacgcacacacacacacacacacacacacacacaaacacatactcgcactcccttcgctggtgccaccatgcacagaaacactaaggtcacaactagtattaacacttcacattatgagtattgtttcaaaagagaagcgattcatggaattaaaacatccacaagagtgattcctctggtgaagatgaagaagctgaagatggagaggtcgcggggtcacgattgtgcgtgcgggatccactgactgtccattggccggcccaggagctcctccacacgccgcgctacgtccattgtgtcctccagatcgaagtccccatcggtgtcaaggactgagtcagggcttgggagggaaagaagagggatgaagggaaggggaaagcctgccagagaccaccccaagccccacaggccaccaggggagcagtctgagccagcctatgccctcagcctggggcttcatgggaaaagaacaaccattcaaacagctggctgtacagcaactcagactgaaataccctcccctgttacctctcacaccggctgtccagacacatcacaactccactcagtccttagagcaagaaaaatctccatattgagagaggggaacagatgacatttgcccaacccgactctaaaccaccaatcacttctggtcaaatctctccctcccaaaggccagagcccgggccagggctgtgtggtctcagacctagaggagctctggattcctttgaccccagccctccaggggtccagcctggggccaagcccccagttcctcccctgtggacccccacaagaatgccacctacttctgtgggtacatgttatagtgagcctggggacacacagctggggagggggcctggtccatgtacgtggcgctgccgcccccggcatctgcagatgcgttcacaaacctgcagaaggaagagaacagagcttcagctgccagggaggccagggcagctgacttggggaggggaccaaggggtatctttgtctttctcagggtgtagaaggacaaagtgccccactcggccctggggctccagctacaggagtggggcctcaggtactggcatagcatcaccaagcccaggtccttccccagggctgagacagtttccccgggggagcggaaagctgggccaggataaggatgggaggcagggtctgggggaggaggaaagaggcagaaggagagccacagccacctggacacttactcagggaccacttgcttgatctgtggcttcacgtatccatcaacagctttagctgccaagggaagaatgtagtaaatcaaagttctcaagtgaaacaaaaatgtgatcttccttatgaatcacatcttttcttaggacagaacacaaccacctaacttatctaaggatatgacacaagcacttaatatttttttgttttgttttttgaaacagtctcactctctcatccaggctggagtacggtggtgcaatctcggctcactgcagcctccgcctcccaggttcaaatgattccgatgcctcagcctcctgagtagctggattacaggtacaccaccacactttggctaatttttgtatttttagtagagatggggtttcaccatgtcacccaggctgttttctaactcctgacctcaagttatctgcccaccttggccccccaaggtgctgggattacaggcataagccaccgcacttggccaagcatttaatatttcaatctgttaggaagacctggtagaggagaaggtcagcactaaaactgaaattcaagatatcttccaaattggcttggatgtttcaataaattcttcaaaccatggaaactatgtacttcaatacaaatctaagtcaagcactaattgcatactaattaaaaaaaaaaaaacaccttgaaaagcttaaagtccaagatgcagcagagagacaggatttgttctacctgacccaggggataaaatcaggaccaggaggggcaggtcataagaggacaaatgttcagtcatgcagggaagaatgttctaagtagaactgccaggaaaagaaatgatttatcttaggaaggactgatttccttgtcactggaggttttcttttttttcttttttgacagagtcttactctgttgcccacactggagtgcagtggtgcgatctcagctcactgcaacctctgccttctgggttcaagtgattctcatgcttcagcctcccgagtagctgggattacaggtgcgcaccaccatgcccagctactttttatatttttggtagagatggggtttctccatgttggtcaggctggtctcgaacccctgacctcaagtgatccacccgccttggcctcccaaagtgctgagattacaggtgtgagccacggtgcctggccatcaccggaggttttcaagcaggaggtgcatacacgtcagggatctaatggaaaggcctaggcactggagagccgctgatctgatctgatgatgtctgaggttcctctaactctgagtgtctagtctttcaggaaagggaaggctacttttcccagcacctgcacgctccttcacgcctggtgtttctgcatttggggtactttgatgtcactagtcccagtgagtgctgttggtgccaagaatgcgatgtgtcctttgcttcccacagaatccccactgggatgtggcagatgagcagataaacctgcacgtgatctggtcaaccacagttaccttttcagaaggctgactatggaaatccaggtaagcaggtggtaagaatgtgattatctgacatgggagaatgaagtcttgtttctgggtacgtgaatatgggaatcagtacaaagttaattatactaggcaaggacgatcacactatgattataggacaaggagcttgtcatttaagtagcccaagagggtgaaacgctgcagggttcaccaattgcttattaccctaatcttcttctagggcttcaagtgtcaggagcgaccttttcataacatgttttttgtgctttacagtgtacagagtattttatagattggctaagaagttaaaaacaaagaaatgctgccagaaataggattttatttttttctgagacagggtcttactctgtcacataggctacagtgcaatggcacaatcatagctcattgcagcctcaaattcctgggctcaaccaatcttccagcctctgccttctgagtagctgggactacaggcatgcgccaccaagcgcagctaactttttcttttttgtagagatggagtctcactatgttgcccaggctggtctcaaactcctaggctcaagcaatccttcctcctccgccttctaatgtgctggaattacaggcatgagccactgtgcccaggcccaaattataagtatcttaaataaccaacatgtaactcaccatacagtgggattgtatgcagtcatcaaaatgaggttggaagattacatttactgagctgtaactctgcataggatatatttcttttttttgaggcagagtctcgctctgttgcccaggctggagtgcagtggtgtgatcttggctcactgcaacctccgcctcccgggttcaagtgattctcttgcctcagcctcctgagtaggtgggattacaggtacctgccaccatgcccggctaatttttgtatgttttttagtagagatggggtttcaccatgttggccaggctggtctcaaactcctgacctcaagtgatccacctgccttggcctcccaaagtgttgggattacaggcatgagccaccatgcccagctacctaggatatatttccaagtaaaaaaaaaaagtcacaaaaaattacatatgatatggtctagactccaacctttcaccctgaactccaaggctggagtgtcctgacctcagttcctaccacttatcttccctgctcaagaggctccagcctccctggccctcctgaggctttccagacatggccattctcaacccaggatttttgtacttgttctcttggcatacaatgtttttctctagatctttgtatggctagcttcctcacttcattcaggtcttttcaaacatcacatcctggctaggtagagtggctcatgcctataatcccagaaccttgggggactgaggaaggaacattgcttgagcccaggaatttgagaccagtctgggaaacacagcaagaccccatatctataaaaataaaataattaaccaggattggtggtgcatgcctgtagtcccaactatgtgggaggctgaggtgggaggatcccttgagtctagcagtttgagactgcagtgagcaatgtactccagcctgggcaacaaagtgagaccccatctcaaacaaacaaacaaacaaaacaacaacaaaaaaaacaaacatgtcctcagagaaaccctccttgaccactctagtaaaataacacctccactctcctccctgccacttctctatccctctaccttgctttatttgtcttcagggcgcccatcactaaattaatatatttgtgttttgtttgtttttgagatggagtctcgctctgtcaccagactggaatgcagtggcatagtctcggctcactgcaacttctgcctccctggttcaagcaattctcctgcctccctggttcaagcgattctcctgcctcagtctcccaagtagctggaattacaggcgcccaccaccacacctgactactttttgtatttttagtagagatggggtttcaccatgttggccaggctggtttcaaactcctgacctcaggtgatatgcctgcctcggcctcccaaaagtctgggattacaggcatgagccaccgcgcccggcctgaatatgtttccttgtttatggtcttcgttctgctgctagataacctccacacaggaagttcaagcaacgggtgatgcaatgtataatacatatctatatatagagtgcaagaatagtcactaaatcatccatagaggttaatctctagatgagagatgttgtgtggtatctgtttttttgttttcttttcttttgtttttgagacagagtttcactcttgttgcccaggctggagtgcaatggcacgatttcagctcaccacaacttccacctctcgggttcaagcaattctcctgcctcagccttcccgagtagctgggattacaggcatgcgccaccatgccaggctaattttgtattttcagtagaggtggggtttctccacgttggtcaggctggtcttgaactcccgacctcaggtgatctgcctgcctcagcctcccaaagtgctgggattataggtgtgagccaccacgcccgaccttccttttttttttttttttgagactgagtctcaccctattgcccaggctggagtgtggtggcgtggtctcagctcactgcaatctccacctcctgggttcaagtgattctcatgcctcagcctcccgagtacctgcgattacaagtgcctgccaccacacctaatttttgtattttttgtagagatagggtttcaccatgttggccaggctggtctggaactcctgacctcaaatgatccgcctgccttggcctcccaaagttctgggattacaggcatgacccaccgtacccagcctgttttcttttttatgcctttatgtgtcttctgaaaattttataataaatatgtaatacttctaaactcagaaagcaataaaaccatctctgtcatgaaaaacaaaattttacctaattttgtttgatctaagcttgtattaaaaagaatttgttttcttcaatttgatatttggggttagtggtagatgtgttttctgtatgactgaagaatccagcccaaggtttacatctgccctggaaaatgctcaaactgctctcactgaatggtaattgtgtgggttttcacacaagagagataacacacgcaggtatgcacacacacacacacacacacacacacacacacacacaacaaaatcaaatcagaatgcgaacattgttaccagtagcagactcgcagggaactggtgtgtagtatttggagtatacttcatcttttggccgatcaggaaacacgtagataaggtaattcaagtctcccaagcggtcggctagggaccgaatggagaagtctctggtggtaaaaggcatcagattccaaaacattctttcctctagatcaataaacagaacaatcacattctaaacatgatttctgaattaggaaatcttaaaaccccaacatactataaattcaagcttgccattataatggctccaatagaaatctccatttaaaaataaccatgggttatagatgaaatacttttatttatttacttacttacttacttattttgagacggagtctcactctgttaccaggttggagtgcagtggtgcgatcttggctcactgcaacctccaactccctggttcaagcgattctcctgcctcagcctcccaagtagctgggattacaggcacgcgccaccacacctggctaattttgtatttttagtagagatggagtttccctatgtcagccaggatggtcttgatctcctgacctcatgatccacccacctcagcctcccaaagtgctgggattacaggcgtgagccaccgtgcccggcctgaaatagttttaaaagccatgggtaggggccaggcatgttggctcatgcctgtaatcccacacttttggaggcctaggcaggtggatcacctgaggtcaggagttcaagaccagcctggctaacatgatgaaccctgtctctactaaaaatacaaaaatcagccaagtgtggtggcactcatccgtagtcccaggtactatgctgaggtaggagaatggcttgaagctgggaggtggaggttgcagtgagctgagatcatgacactgcactccagcctgggtgacagagaccccatctcaaaaataaataaataaataaataaataaaaataaaagccatgggtagataagcaggtaatacaaaaatcacttcccaagagatccaatgatctcagacgtttcaagttcaaacagtattctagccctcagtagaagaaacagtttttactggcccccaatccctgatttcccatacaaagatatataaaagctaggaagcatgcccacaaccagagaaagcataagagctattaaaagtgatgaattttttttttttcgagatggagtcttgctctgttgcccaggctggagtgcagtggcgcgatctcggctcactgcaagctccgcctcccgggttcacgccattctcctgcctcagcctcccaagtagctgggactacaggtgcccacaactacacccggctaatttttttgtgtttttagtagagacgggggtttcactgtgatggccaggatggtctcgatctcctgacctcatgatccgcctgccttggcctcccaaagtgctgggattacaggcgtgagccaccgcacccagcctttttttttttttcttttaagagacagggtcttactctgttgcccaggctggagtacagtgatgtgatcatgactcactgtaaccttgaactcccagggtcaagtgatcatcccacctcaccctccagagtagctgggactacaggcgcacaccatgagcaccaccatgcccacctaattaacttatttatttatttatttacttagagacagggtcttactatgttgcccaagctgggcttgaactcctggcctcaagagatcctcctgcctgaggctcccaaagtgctgggattacaggcatgagccaccgcacccagccaaaagttattaaaaactttaattcacagaaaatgaaccagcaagctacccttattgtgagggtcagaggagagaactaactttcctgatgccctggtgcagtggctcaagcccgtaatcccaatactttgggaagccaaagtgggggattgtttgagcccaggagttcgagaccagcctgggcaacatacaaaaaatttaaaaattagatgggtgtggtggtgcacgtctgtggtcccagctaatcgggaggctaagggaggaggactgcttgaggccaggaggtcaaggctgcagtgagccatgtttgtgccgctgcactccagcccgggcaaaagagtgagaccctgtttcaaaaaaagaaaagaactaacatcttgggtagaaatggttgatggcaatatccatatgttaattaggataaaggaatatttttactactgtaagaactccaaatcatcaaattcttcactgaaataagctttatgcagagtagtacaataaggcaaacattttaagagggaagcaactgagattctgcacggactcttgtatcataggtagccatgtcatggttaaatgttcatgtgtaaccatgctgccatatactttcatgtataaccaaattagcaattgtgtttcccataatagtatttttcataggctgccttattatgagtatgtcatggctatacatttatgtttcccataattagtactgacctcaacaaatagtaagtacccactaaattatttgttaaaataattttgtaacgaaagcagctaactttggacataagaagggaggggcactcacgagaatcaaacttccaagcaatggtgatgccgccaatttctgagtcactgaatctcaggaggaaggtcccatctggcttgttaatgagtaggtcatgggcctgttgcttgtttacaaaccccaaaatggccctggatcaccaaggacaaaggacagaagcagagtgtgacttacgatgccagagagaagaccttcagactctgtcggcgccttaagaaataatgattctcacccatcattccaatgaggcttgagatgtttttttaacacttccatcacaccgtcaaaccattgccagaaagtgtaattccgtcctggtaaattctcctggttggagatacaacagtgaacataagaacaccagagtaacacttggaatattatacacatatttaattggaaaaattaaatgggaaacaaacatctacccttgtcagaggcatacaaatatccccgcctacctgagttttacctaatggccccatggagaggaaaagagggaagaaggggaaaataccaaactgcagttaccagcacccagtgggctcctgctacagacactttcacctgggactgggctgacccgtcccttgctagtttcgatgtgtggtctgtgaccagaagcatcagtgtcacctgggagcttctgagaaatgcacgttgttaggctccaaattaaacatttaaaacaccttgggggtggggggtgtaggaaaagaaacaaaaattaaattcaaatcaaggtgatagccgggcatggtggctcacgtctgtaatcccagcactttgggaggctgaggtaggcagatcacttgaggtcaggagtttgagaccatcctggccaacatggtgaaaccccgtctctactaaaaatacaaaaattggctggacatggtggcgggtgcctgtaatcccggctactcaggaggctgagacaggagaatcacttgaatctgggagacggaggttgcagtgagcccagaatgtaccactgcactccttgtgacagagcgagacaccatctcaaaaataaataaataaacaaaaataaatagggtgggcacagtggactcacgcctgtaatcccagcactttgggaggccgaggcgggcagatcacctgaggtcgggagttcgagaccagcctgaccaacatggagaaaccccgtctccactaaaaatacaaaattgcggggcgtggtgccgcatgcctgtaatcccagctactcgggaggctgaggcaggagaatcgcttgaaaccaggaggcggcggttgcggtgagccaagatcgtgccattgcagtccagcctgggcaacaagagcgaaactctgtctcaaaaaaaaaaaatgaataaaaataaaatcaaagtgacgtctgaattagcagatgctagaggaggagtttctttcatcagcatccctctttgtgggttgagggtcccataggagcctgatctggcattacacatggggaacataagagagtaaaggggagagaggcccagagttcgcatcccctcaaaagctttgcttctcatgagctatgttaacatctgctttgctctatttcctttacaaaggaagaaaatgcattaactgtagacaaaggtcaacttatttaaaatatgcaaagatgtaattttctacacgtgacctgggtaactctcaagttgtccatctagtcagaagcttctattactttcggtacattttattagagacatgaagaataagggcccagggcagggagactcctgagagcatctggttgggaaggactgatctaacagcggctggcagctgggctcctcaccctgttgaactgggaccaggacacagacaggccactgtagtcctccaggtggctgctgctgttgttgaacagtttctgcgccaggaacacgaggttctccttggtcaggccccggttgctctgcacttcggccttgaatttcatgttgagcgcctcacacagctgtggccacagcactttgtcaggcacggcaaatggcaccctgccctgagagggagagaggccagaatctgatgagaaaacagttgcatgatttattccctcaagccacaaaagaaaaacgctgatggctgggagtggttacacacatttgtcttgcagggcctgaggataaattcagactctgctggggtacacggttctgtgaaattcagaaggttccgtttcaccttctttacacacaactagaaggtaacccatgctatccatgctgttttgtaaatgagctgctgaactaacagtcaaatcctatgttctaacggccacaaaccaaaacataaccaaggtctggctcttagattgtaaacaccttgggaatttagaaatctgaaagactggtcctctaggtacaaacagagagagtgtgcgtatgtgtgcacacgtgtcggcatgtgtgtacacacgtggaatcattgccctcgactccttctgccaagaattctagctcaaagtaaaacaacttggtatggaagagtggaaattttgagttggatggctttattgagaaataggttagaagattaacttttaataaactgcttttcaacccgttcagccatagtactccattttattttgttacaaacacttttttcaataggtgattttcacatgatttaaaattcaaaaagcacagacggctacacagtgaagtcactccctatccctgtctcccagcaacccagttcttttctttaaaggcacctaacacagtttcttgtgtatcccaccaaagatattctatgcatgccagcaatgacatataccttttccttttcttcacaaatgacagcacaaaatccacatgttctgcatcttcctcttttcacttaatcctctatctgggagacctcccatcagcacataaagaaatttcaccagacccccatagatgggcatcagtgttacagcctcatctttagctattactaacaatgctgcaatgttcttatgttatttgacccacaggacacataggcaaatatatatggagaataaatttccacaattatttttttttttaggtaaggtctcgctctgtcatccaggctggagtacagtggcccaatcttggctcattgcaacttctgcctccttagctcaagtaattatcctacctcagcctcccaaacagctgggactacaggcgtgcaccaccatgcctggctaatttgtgtgttttttgtagagacagggttttgctatgttgacaaggctggcctcaaattcctgggctcaagagatccgcttgccttggcctcccaaagtgctgggattgcaggcataaaccactgtgcctggccacaagtctttattatttattttttattttttatttttttgagacagagtctcactgtgttgcccaggctggagtgcagtggcaccatctcaggtcactacaacctctgcctcccaggttcaagcaattctcctgcctcagcctcccgagtagctgggatcataggcacgcaccaccacgcccagctaatttttgtatttttagtagagatgagagtctcaccatgttggccaagctggtctcgaattcctgacctcaaatgatccacccacctcggcctcccaaagtgctgggattacaggtgtgagccaccgtgcccagctgaaagtcttttttttaacatagcataaggtcggctgggtgcagtggctcatgcctataatcccagcactttgggaggccgaggtgggtggatcacttgaggtcaagaattcgagaccagcctggccaacatggtgagacctggtctctactaaaaatataaaaaattaattgggcgtggtggcatgcacctgtaatcccagcttctcgggaggctgaggcaggagaatcgcttgaatccagaaggcagaagctgcagtgagccgagataatgccactgtactccagcctgggtgacagagcaagactctgtctcaaaaaaattaaaaaaaaaaaaatagcataagatgtaagtagtcattaacatagctgagaatgttaaaaatgcttatttatttagacaagatacttgagtaattacatggtgcaggagatgccaaaggtacacagagagtgagatctgtggacaggcagggaaggaaacaagagatgtggcaatcttatctaggaggcttatcaggacaagaggcagacagacagtttcaaaaaggagcttctgattcagagtttgtaagtgaagtatggtaaatctcttaaaaatctcacctttgcagtaaaatactttttctctaaagaggagtgttgggaaacgttaagcctctccacgtgagccagaaggttccatttcaccttctttacacacaactggaaggtaacccatgctgtccatgctgttttgtaaatgagctgttgaactaacagtcaaatcctatattctaacagccacaaaacaaaacataatcaaggtttgttggatatacttagagaaggacatgctcttatgtcccaaatgataacccttttatcatgcttttatggactaatctctattggaaatatgtaacaaatgacctttgcctactaaaaaaatttttttctttgagacagggtgtcgctttgtcacccaggctggagtacagtggcacaatcttggctcactgcagcctggacctcctgggctcaggcgatcctcccgcctcagccccccccaagtagctgggactagaggctggtgtaccatgcctggctaattttttggtattttttgtagagacaggattttgctatgctgcctaggctagtctggagctcaagggatctgcctgccttggcctcctggagtgctgggattataggcatgagccaccgcacccagcctatgagatctttaaaatgctcatcgagcagcatgctagtgggattcagatagcgtttgggtgcataaatccaccaaattatatcttccttgaggcaaagtatctcattcttcatgagacctagaatgaatcacagaaactaaaatttggaaaagacatttaacagcatcttcatttattgaaaggaagagggtatgaagcaacttctatgctaaagtaagcctctggagagatctaacctctggagtgaacctaggagtcccaaatcccattcatagtttcacccaaggattcaaaataatatttactgagtactgactgtgtggcaagcattttctatgttatctaatttaatcttcctaacaatgctgtagagcaagagtatccctgtgctgcagacacttgctggaaactcaggctcagagaggtaaagtgaactgcccatgtggtcatggagtgaggaaatggtggagtctcagttcaaaccctggcccgatgtcaagcccatgttctttccactttccacattctttctattctgcctcccactaaagaaaacagcgtcttttttcctatgctttttttttattattgagatggagtctcactctgtcacccaggctggagtgcagtggtgcgatctcggctcactgcaacctctgccgctcgggttcaagtgattgtcgtgcctcagcctcccaagtagctgggactacaggcatgtgccaccacacccagctaatttttcggtattttttaatagaaacaggattttgctatgttggccaggctggtctcgaactcctgacctcaggtgatccaaccgcctcggcctcccaaagtgctgggattacaagtgtgagtcactgcacccggccttttcctatgctttttaaaaggataatacataaatgagattcatgacaccggcattgattttgggacccacatgcccgaggaatacactcacaggctctgcaaaagcattgtcccagagaacagtggccgtcgcattgttgtcctggctgccatgaacgatcaccaccactggcagggacagggtctaaaaagacacaagagaaggctgagcgcccacgagcctcaagttcttctccttctctcttttttttttttcttattataacaacacttttattttccaagtttcagttaatgttcctctcagacacagaatctaaatggccccaggaataatatgacttttcatactggcacaatcttagaaattttaaatattttacaagcaatgttgcttagatatttctgaaggataaagtttctcaaagttacatggagaacaggagagagaaaagactattggagatatttctgggaagaaaatacaaataacaaatttaaaacttaccacaacctttactcaaattcatcccaagtaatgtttctcatatccattttgtagtctacctctccagctagttcagttcattattgtttgttcatgttttattttttattttttaatttgttgttgttgttgagacggggtctcacaaccagctccaggctggtctggaactcctgaactcaagcaatcctcctgccttggcctcccaaagtgttaggattacagatgtgagccactgcactgggccttgcttgttcatgtcttttttttttttttttgagacagggtctcactctttcacccaggctggagtgcagtggcacaatctcggttcattacaacctcagcctcccaggttcaagtgattctcctgagtagctgggattataggcacgtgccaccacgcctggctaatttttgtactttttagtagagatggggtttcactgtgttagccaggctggtcttgaactcttgacctcaagtgacctgactgcctcaacctaccaaagtgctgggattacaagcatgagccactgtgcttggcctctgttcatgtcttaagagaacctaagtgaaacagttctcagggtgaggtcagtccattttcagtttaccaacagtcaaaaagaagaagatgctatgtgataaaaaaaaaatattttgtaacataaagtacaccacacacacacacgcacacgcacacgcagagctgagggaaggctttaccttgacttgaaaaaccagctcatttccaccaacactgaactgggattcaaacaggattgtaaatttttcttctgtcaccgactctgccccacgacggtctgacctcttaattcgtttcagggactacaaagaagaaacataagatgaaacgtaagatataagttgttcccctcaaagaccagggaaaaattcattcttcctcttcttccaccctcaccatattcctgaagtgggcactaagggtgcctgtggcttggtggtactccatgacgcagcagttgttcaagatctcgccactgtaatcactgcaaatcagagagagaccagctccaaacccatgccagggtctcaggacatgcggagtaaataatataatttggggtagcaggaaatagagaagtttgctaaaaatgtacgtcatttagaggaaatgttagctacataacacatacatgtaatcttctcggacgtatctctacaaaatgaaacaagatcaaactatcttcacagaaaacagttcctaagagaacttttttttttttttttgtgacggagttttgctcttgttgcccaggctggagtgcagtggcgtgatctcagctcactgcaatctcagctcactgcaatctctgcctcccaggttcaagggattctcctgcctcaggctctctagtggctgggattacaggtgcctgccaccacgcccggctaattttttgtatttttagtagagacagggtttcaccatgttggccaggctggtcttgaactcctgacctcaggtgatctgcccacctcggcctcttaaagtgcttggattacaggtgtgagccaccacaccaggcccaagaacttccttatattcctttgctgatgcccagaagaggccagaagggcaaacagggatctgacacaggaggcagaattctttttttcctgttgccaggacatgagacaagtagcagggaatgagaggaagctgcacaattacttgcgggtgttctcgttcttgagcagagacttggcctgctgctcactgatgatggtggccttcacctggggggggttcatgtgcacgttcagcttcccgcccaccagcaggcgcacagtggctgcaaacttggtctgggtcttcaggacctgaggaggctgcttctcaatgatgaacgtgctgcaggggacacagggacagatgcatgatgaggggctggtgcaggggaaagggctctcagtccctctgtggtgggggtggggctgcctcccgaggggctcaggaggtgaagagctcgggcacagcctctgttcctggggaagccgtgagagtccagggagaggatggagaggggagtgagataacacagaagctggcatgggctgcagcccaagggcatctcttgcagtgtccacaggagaaactgggcaagggccacagcaactggagatggagttgggagggatgagaggcaggaagtggatctgctggtctggaaggcacctgcggctccccccacgcaggcaggagctgccccaagctcctgggcatggcaaacaggcagcagtcacctggtcaccagggctgagataatgtccgtgatggtggcgttgacctcggccagcatctcctccactgggccggggatgggcagctgctggcagaggtgctcagccctgcggatctgctgccggttctgccagatgatctcggccaacttctcacacctgcacgagagccccaaggccaacaggaggacaatggctcctccgcacagacgccaggccccaagacacagctcccgttcccccaggaaggctctgtgctttcgccacacttcccacccatgggaagagcagagctccctgcctcccagaattagagacgtacacaggaggggcgaccctgactaggcccaaacagcccaagcatcaccccacacacccgaaccctgtcccatctccaggacagcagcccccttcctgggggaggtgcacaggatgggggccaaagtctgattgaggaaccaggctccctggagaaacaagagctgtcccaggatggagggggcctgctgcaggagccagcacaggacgcagaagcagccgggatccccaccagcccctcctgccctgcccgctggccgccccacaccattaccaggactgtagcacgtccaggctgccctcggggggcccgccgttcccggccagctgctgccgccgcttccactggatcagctcgtcatccaggatgatggtctgctgcttccgcagcagctgcagggtcttctggtgcttctcggccagctcctgagggaagggaggagagcagccccttctgggctcccagagaacaccgcagggcctcgctgggaaatggcagggcagggcccaggccgttccctctccccaagctgctctgcctcgcaaggcccccaggaaaaaaggcctcctgccctcccaggttctgctctcatgctggtcccagccctccctcgggtccccagagactgacttcatggcacccacgcccaggagaggcccaggaccccactcaccacgcggtactgctgcagtgtctgtgcctcacgctgcaaccaggcctccagagacacctgcttctgctggagggccgtctcccggctcagacgctcctgggggctcagctgggccagcgggccaaactgagctagaggaggggagaggaaaccatgaccatcacctcccagtgtccaacaggaggcccagagaagcccactcacccgttctggagcgagaccctcctgggctcagatactgcattaagggcaagtcggggttcctgacagccaggggggccaagatgaatgggtgccccaggaggcgcctctgggccctgctcgccagcctcctgactctgagccgtcccctctgggggcacacgggtgctggggcagctggggaggaggcctgcctgcctcctgcccgcctgcctcacagggctgccagccctcttctcgcggcccagcatgggtccaggctgtctggggtgtaagtgtgcccatgcccttgactgcaggtgaacctgggcaaatcgctttcctttcctgtgccttggcttccccacgtgtaaaacgggagattctcggcacctgcctcagtggggtgcattaagattaaatacatgaggacatggaagatgccagaaagctgcctgacatgggtgagctctgtgtgaggttcgtgcttcttggttaacggggaacaggacagagagaagaggtgacagagacaagcagctgctcggccccatccctcccgcagcaaggcctcttcagggaaacccagccccggcggctctgtctagtccctgagcacagcaatccctcctcaggggaggatgagattcttgagaggctggaaggggcccagcatgtttgtccaggtgagctcactgtgaacccagccaaccaaccagggaacacggacagacagacagaccgcagagggagagcatgtccagggccactggggatgcagagccaccaagattctctcaggaaagggaggccgaagggaggcggcttccctccacaccatctgtgaggagtctcattgatggcgggacagggagtaagttaggcctcattaccttttaaaaattattatgaaataggtaagacacagggaacgtggaacacaggagcacctgtgtatcaataacccaggctaagaaagtaaacatgtccacagttacaaccaccaccgcaggcccaccccaccctcccagcgacagcccgtctccaccacactgggactattaatcccttcccatcaccttctcaacagcccagagtccttgcttgagctgagtcagaagatgcgcgcaccagcatgtcttggtcgagctcctggctggcccctgagggccacgtcactctgaccccagccctgacccatgggatgcacaagctgggacagacaaaagcaactctatgtagccaggaacagcccagagctagaactcagaaatatggctccaatctcactgcaggtatcgagcaggaagaggatcatccagggacggacagatccaaggtatctgcacggctacctcaggaatcctgcccagccacagggagggtggtggtgatcccaacacctgggcccagccttcctatgcaagggacccacttagggctctcctggaaatttgcagaagcttttgggaaggaggccagggagacgggaagcaatttccctactccactggaggcagctgagccttccctggcaaaagcagatcaatagtctgtgtttctgctgagtgaacttgacaaatgggactgagaagacactgcgtgatagatccaaacccaacctgaatccaaacctaatccgccaccatgcacaggaaacagaaaagccaggcacgggatcagaaatactgttgacagtctaaggacttgggtaggaatagccatcccaaatcttccgtttccattctctgaaggagctgcccttcttctagggccagtctaggatggattcagataaaaaaggaagacaggctagaatcatcctgtcaacctttactcaataactgttatgtttcaggcattgtgctggcctcagggtacagagataaaagatatagtcccttctcaaagatttatattccagtggagaagataaagagtaaataagtagtatcactatagacataaaatggaacctacatacatggaattagaggagcatgtgctgtgtgtgtgtgtgtgtgctgtgtgtctatgtgtgtgtggtgtgtatgtgtggtgtgtgtgtgtgctatgtgtggtgtgtgtgtgctgtgtgtggtgtggtgtgtgtgtgctgtgtgtggtgtggtgtgtgtggtgtggtgtgtgtgtgctgtgtgtctgtgtgtgtgctgtgtgtggtgtgtgtgtgctgtgtgtgtgcactgtgtgtctctgtgtgctgtggggggtgtgtgtgctgtgtgtgtgtgtgctgtgtgtgtgatgtgtgtggtgtgtgtgtgtgctgtgttgtctgtgtgtgctgtgtgtgtgtgtgtttggaggggctgggtggttgagccaaggcttctctgagactgagctgggcatggaagcagagaggaaactattaaagctcaaactgccaaactgctacagggtcaaaagggggcgctggtggggctccacagcctcaccacagactgaagctctctgtgccccaactactaagcaggatttataccaggctagggaagctctgtccataagggctacctaaggggcgttaagtgtactctgtttcaggaagacctctgtgaataactgcatagaacattagaaatcatatacaggtccttagtacttacacgtacctgcttagaaaggtttcttttcccccttagagatagggtcttactatgttgcctaagctagtctgaaactactggcctcaagtgatcctcctgccctggcctcccaaagcaccaggattacaggtgtgcaaaaccactcccagcttagaattttttttttttttttttgagacagaattttgctctttttgtccaggctggagtgcaatggtgagatctcggctccctgcaacctccgcctcccgggttcaagagattctcttgcctcagcctcccaagtagctgggattacatgcatgcgccactgggatgcccagctaattttgtatttttagtagagacggggtttcaccatgttggccaggctggtctcgaactcctgacctcaggtgatccgcctgcctcagcctcccaaagtgctgggattacaggtgtgagccaccgtgcccagccagaaaaatttttaaacatgtaattatataatttcctatttatcatttcaataaagctccacttataatatgcctactatatacaaaagtattgtttgctagtatttatttagactgtgagctccttctcaaaagaagaaatgtcttccctggcagctcagaagctccctggatgtggggacctgagtgagatatgcacttaagcggggggtcctgtcatctccccttcctaaatctcatcctctcagcactgtcttcaatgcaaataagtccctgctactcagagaaaggtcgctgcctccgaatggaaagtgtgctttctcccaaccccaccagagctgctttccagtccccaggcccaatcctcaagttgcacaatgtgcctccaccgcgcctcaccttggatcctcaggctctcctggtactggatgatgaagtactcctgagtctgctgcagcttttttaactcattctctgtgtcctgcgtgaccagtcgcagctcctcaaacgtctggttgatctggaggtgtttctgggacatggcatcagcaaggcttccagctggagagctaccctgggaacatatggggggcagtgcaaggcagtgcgaatgggaggaagactgaggccttaatccccaggaaaagccagctcctacaaccagggtaagaccccaaaaggtaaattttgagtcgggaggaaaagcaaacgtcatcatgagacacagggtggagtgggaaaagtgagaaacaggtgagcggacagatcatggctcagatcacaaagcatgggagaagcttccatttcagatctgacctccaccagagtattccaaacgaggtccattgaattacctttggagaaactagaacgtaacctggtccagtgtcacctgggttttcctactaatgaggaggtggagtgattcctcttccactcactgacccaatgcaaggacggcattaagcattagggaggccatggggagcagggccatgtgaacacacatcatctgtgtcctcactcaagatattctcgtgatggaatcatttgcttccaccatggaagaggccaaacctcttgcaggcatcctggagaccccagggtgaagtgatgggggaggcataaacaaggtctctgtggacccagccctgtaagtgacctgatcagaccactccttccacacctgattcaggggctagggaaaagtctttcctaagtattctcacctgaatatgagcatgcctttactaaaaaattattcagctgaggttgaattactttgcacttgttcacattgtcttgtggttgcaatctcatcaaggttataaatcagttaagatcagagaccacatcttctatttcatttttttttttttgagacagggtctcactccatcacccatgagtgcaggggtgcgatcatggctcactgcagcctctacctcctgggctcaagggatcttcccacttcaggttttcgaacagccaggactacaggcatatgccaccatgcccagctaatttttttgtatttttggtagagacggggtttcatcatgttgcccagggtgctctcgaactcctgggctcaggcaatctgcctgcctcagcctcccaaagtgctgggctgcactcagtcaagtctcctatttcttttgtgccccttaggatgaagctctctttaaagagacaccaatagtgcaccctgagtcaccttgacaaaggtgggtccagagggaggtgggtaagaaaagacttcccgactgccctccccatccctatgggacactcacattgttggcttctcggaccaacctctgttcattgtacaatatatggcggatgcagcggaccagctccatggggcagcggtcatacgtgttctgaaagaatccaacagcagacatcactttgtgccactccacactatgggccctaaccatgcctcaggatggggagcctcctgagggacctcctgaatcacaggaggcactgttcctccaataccaacaggaacaagaaggcacatcatggaaatccaattgcagtgaaaaggtaagattgttttacttcttttttctttttttgagactgagtctcactctgttgcccaggctggagtgcagtggcacaacctcgggccactgcaacctctgcctcctgggttcaagtaattctcctgccttagccccccgagtagctgggattacaggggcccgccaccacgcctggctaatttttgtctttttagtagagatggggttccaccatgttggccaggctggtctcgaactcctgacctcaggtgatccacctgccttagcctcccaaagtgctgttttactttttgcatcttaatttgcctaaagtatccggggaacattcttaaaaacggaataaataagttttaaaagcctcgcaagaggagaaactggatgccactctcaaatgggcaatcaaaactactaccaccaatgaggggacgagggacactgcccccctctggatgtgatacccgagaaggacaagtcacctacaattgtcccttggcatctgtgggggctggttccaggacccacttggataccaaaatctgcagatgctcaagttccttatataaaatggcatcgttttgcatagaatgcatacaatcctcccatacactttaaaccacctatagattgcttatactatctaatacaaaagaaatgctatgtaaatagctgttctgtcatatctttatttctatttgtttttactttttttcttttcctgaatatttctgagctgcggttggtggaatcaggatgcagaacccatggacatggacagccaactatatttagaagtctgctcggagatgtgcaatgttaacgtaatcatgaggaaacatcagacaaaccccaaatgaggaacattttatctttaaaaagcagggggtacatgaattattattattattttttgagatggaatttcactcttgtcacccaggctggagtgcaatggcacggtctcggctcactgcaacctctgcctcccaggtttaagagattctcctgcctcagcctcccaagtagctgggattacagttgtccactgccacacccagttaatttctgtatttttagtagagatggggtttcaccatgttggccaggctggtctcgaactcctgacctcagatgattcacccgcctcagcctcccaaagtgctgggattactggtgtgagccactgcacccagcctacattaattattttaaaatgccaatgtaatgaaagacaaagtaaggttgcaaaatggttccagattaaaggagattaaagagacatgatgactagatgcaatatgtgatcttgggctggattctggactgcagcggggaaaaataccctaaaggacatgtttgaattagttgacaaaatggaaatccagatgagtacctaaaagtattatatcaatgctaaatttagtgaagttgatcagtgtattataaccatgcaagacaaggttcattcttagaaaatgcacagaggggctgggtgcggtggctcatgcctgtaatcccagcactttgggaggccgaggagggtgaatcacctgaggtcgggagttcgaaaccagcctgaccaacatggagaaaccccatctctactaaaaatacaaaaattaggcgggtgtggtggcatgcacctgtagtcccagctacttgggaggctgaggcaggagaatcacttgaacccgggaggtggaggttgcggtgagccgagaccgcgccactgcactccagcctgggcaacaagagtgaaactccatctcaaaaaaaaaaaaaaaaaaagacaatgcacagagggaccgggcatagtggctcatgcctataatttcaacactttgggaggctgaggtgggcggatcacctgaggtcaggagttcaagaccactgtggccaacatggcaaaaccccgtctccactaaaaataccaaaaaaaaaaaaaaactgccaggcatggtggcaggagcctgtaatcccagctacttgagaggctgaggcagaagaatcgcttgaacccgggaggcagaggttgcagtgagctgagattgctccactgcactccagcctgggcgacagagcaagactccgtctcaaaaataaataaataaataaataaataaataaataaatagaaaatgcacagaggtacttactggtgcagggacacaaggtatgcaacttactctccagtgactgaaaaacgtgtgtgtcgagagacagcgaggagtatatgacaacataaaagtcaacaacaggtgaatatgggcatatgtggggaatctttgtatgattcttgtaactttctggaagtatgaaattattctcaaataaaaagtaaaaaaaaaaaaaaagaccaaaaccacacaacaagaaccttatgcacgtgtaactcaacaatgctggactgaaggagagaaagaaagtctctacaggaagaagacccccaagggaaggtaattaagtgtgaccccagagcccacacccacctggagctgtgtggcatagtgccccagcttgatcttcagtaaaaacccatcttcccccacctggtgctctgccttcttctgcagctcctgcaccaggccctccaggagctgggtggccttaatgttctcctgtggattatcaagatctactgagtccctaggggaaaaaaattacataatctgtatacatacatgcacgtgagcctgtataaatacagcctcaacacatcctactttttcttcaactaaagtgatgtttttaatcctcactgcaaattttaagaaacagcccaacagaaatggactcaatgcctatgttaatctatttgtaatttactaaatagttggattatacagtagatttccttcttttaaaaaaaaaaatttttaacaatgtgctgcccttcttcctttctctcaatgatgtgcttggtgcttatgctatttgctccgagaaatgcaaggaaaaggaaagggttctgtgtactctgaaggaaataaggacttggataatttcctatttatagttacccctcatgggtgtaaaggaggcacaaggccaagactcttctacatgtcctttccagcctcaaggagtttggtatctgtgggtttcttaggtagagacaggtgaaacaagttattgctatttctaagaagccctggaaatgagacattcaggcagagggtgcctacaagaatttatacgagtcagacattcatgtcactagttgcagacccaggacctgaaggcaatgccaacttttccagtaaacaaggaaaaccacgctacagactttgcattgatttcaagctactgaactggtgacgggggttggatggtctccctccctcctttctttccttctttccttctttccttccgttccttccttcctttctactacttaggcaacaattgacactgggaagtaccaaattacttactcactgaagaaaccaaacagctgtcggactgaaataacattcaataactgctgactgggtctggagccaaacaagatagtggtagctaaaaggctctgccatccctaaatccctgaagatagcaactaatttcaaaaaagaggcaccaacaagtgtatcaaaacagtgagaccggccgggcgtggtggctcacgcctgtgatcctagcattttgggaggccgaggcaggcggattacctgagctcaggagttggagatcagcctgggcaacacggtgaaaccccatctctactaaaacacaaaagaaattatccgggcgtggcggcatgtgcctgtagtcccagctacttgggaggctgaggcaggagaactgcttgaacccaggaggtggaggttgcagtgagccaagattgcgccactgcactccagcctgggtgacaaagcaagattctctctacgaaaacataacaaaacaaaacaaaaaaagcagtgataccatagtccatcaaatagtacaccccaatctgcgccttgagaaggcagttaaggcaagtcagattctaaatatgtgtgccctatgtattaaatagaatacgtattaaatgaaaggctggaaggaatgagggcagccctgcacctctgtttcaactggcaacaatgcccttggtctggaaacccactctttttctttgagacgaagtctcactctgtcacccaggctgggatgcagtagcacgatcttagctcactgcaacctctgcctcccgggttcaagtgattctcctgcctcagcctcccaagtagctggaattacaggcgtgcaccaccacgcctggctaatttttgtatttttaatagagacggggttttaccatgttggccaggctggtctcaaactcctgatctcaagtgatccacccacctcagcctcccaaagtgctgggattacaggcgtgagccaccgtgcccggccaggagcccactcttaaaaggatccagtctctgagcaaaactcacagaagtcaggtattggttctttacttgaaaccttaattctctgttaaaaaaaaaaaagacttgcttagatggcttaaacataaagaactaaagatttggctgggcccggtggctcaagcttttaatcccagcactttgggaggccgaaatgggcagatcacaaggtcaggagttagagaccagcctggccaacatgatgaaaccccgtctctattaaaaatacaaaaattagctcggtgtggtggcgggcacctgcagtcccagctactcgggaagctgaggcacgagaattgcttgaacccgggaggcggagattgcagtgagccgagatcacgccactgcagcctggtgacagagcgagactccatctcaaaaaaaaaaaagaattgaaaattcttcattaaaatctttatattctgaagaaaaccaaagctaaaaaatttcaagttttccttaatatcaacacaagtcttttaattcattcagtgagaacaccaaatgagaactctgctaagtgaaatctgaaattaacagcaacttcctactcatgtttttctaaatcctccacatcagaaaacaggagagaaaatgaaaagggagtggaaagcactaaacgaggtacagctgacattctcatatttagctaatttttttccctcacttaattacatgaagttgagtttttttttaattgcctagaaaattgcctttctttggtgatctttagtttctgaacagaaatttgctactaacacgcattgcgattattctaaggcaacattacagacaggtatatggccctttgcaaatagcagcatcaaagctggttctctcagggactgtcaaagaggacccatggctaagacggtgaggcttgaagtatcaaatgaatatgtcagatcgactgacagactgtaaccaaccagcaacctcccagaccttgagcagagcagtgtacatcctgctgcctggtgtgtaataatgataccaattaaaaacctgtgctgttagtcgactgcactgtactaattctaaaagaaatttaaaacaactctcccctcccccaagtatgtaatcagtaatctggaaaataaagaaaaattaaaatgcttatcaaatctaccaccagaatgtaattagtgttaacatttgggtatattttcgtttagttttgttttttttttttaaaggcagtctcactctgttgcccaggctggagtgcagtagtgcgatctcggctcactgcaacctctgcctcccgacttcaagcgattctcatgctttagcctccagagtagctgggattacaggcgcccgtcaccacgcccaactaattttttgtattttcagtagagatgggattttgccatgttggccaggcttgtctcagaactcctggcctccagtgatctgcctgccttggcctcccaaagtgctgggattacaggcatgagccacaacacccactcaattttcttttagtctttatgtgtatatataaaatacatataaattaaaaacaccaatgtctccactgttaaattattaatttttagttttttgttagatgtaaacttattaagaaatgtaaaataatttatatttaataaactataagaaataaattataattaaattatatgcatattcacacctatctgccccattaaacactaaattattattattattttttgacataggatcttgctatgttgcctaggctggcctcaaactgctggggtcaagcaatcctcccacctcagcatcctgggtagctgggattataggtgtgcaccaccatgtccagtgaaacactgaattatctggagatgagggctttaattttgtttgtttgtttgttttgagacagggtctcactctgttgcttaggctggagtgtagtggtgtgatcatgggttacagcaacctttgcctcccaggctcaagtgatcctcccacctcagcctcccaagtagctggtactacaggtgcacaccaccacacctggctaatttttgtattttgtacagagacagggttttgctatgttgctcaggccttccttgaactcctgggctcaagcagtacacctgccttggcctcccaaagtgttgggattacaacacaatgttgggctttaatttttttcatataaattctactacttaggacactgctaggcatcccatgggcactcgaaacatatttgttggctgctctttcttagcagtaatattctaatgcttttagacagtatttactattaaaggggaacaaatcctgttttaaaaatcccaagagttattccatcccctcaatctaagatgggcttaaatacctttcacctataaaaagaaaaaaaattttaaatacctttttatggatcacatttaaaaatgtttaaaaatacaactttgaaagttgccatcatgacatctttctaaacaaactccaatattcttgtgtttcacaaaatatgatgcaaacatccttgttcacctaccatgcttggctttcaatccactgggataaataatgccgcacctcaatgggaaaatgctggccatataacgcttgcatctgatgaagggcttctccttggagctgctgagcttgtatccacacagccatggtttacaatctgttgaacaaacaatcagtgctttgggcgttttttctttattttccccttacatccaccagagtaaatattcacttagttaccaaggtaaatgtttttattttattatttatttttatttttatttttttgagacagtctcgctctgccacccaagctggagtgcagtggcacaatcttggctcactacaacctccgcctccccggttcaaatgattctcctgtctcagcctcctgagtagctgggattacaggggcacactaccatgcttggttaatttttgtatttttagtagagatggggtttcaccgtgttggccaggctggtctcgaactcctgaccttaagtgatcctcccacctcagcctcctaaagtgctgggattacaggcgtgagccaccacgtttggccaaagtaaatgtttttagcccttttggtagactaaagacaatattcttgaactgaattttaactttaaaatgttttcaaaatgtagacactcagcctggccatggaaagatacacagctgggtctatgaagctctgactatgaaatgtactaaggtcttataagcaaaagtacaaaaggagaattagggaaagaattgctaactttgacatcgtagacatattctttacttttgttcaaaattgtcagccatggtaagcagcatttcaacagtaataaataattagcagagagtttttttttttttttttttgagacagagtcttgctctgttgcccagactggagggcagtggcaagatctcggctcactgcaacctctgcctcccgggttcaagcaattctactgcctcagcctcccaagtagctgagattacaggtgcccgccaccgcacccagctaatttttgtattttcagtagagatggggtttcaccatgttggccaggatggtctcaaactcctgacctcaagtgatccatctcagctcccaaagggctggggttataggtgtgagccactgcgcccagctgagagattttttttaaaaaatcacttgttttagatttggtattttgacttcagaaatataataaacatatgccattttgaaaaagcccagtaaaagaaaagtgaaaatatctgaagtgttgattgaaccctatgcattatcactagttacctaagcagcaatgctttgcacacaaagagcacagatttatctggaaaaatgcccgaaggttcacctcctgagttactgctaaggaatttatgaagcaatgttgttaaattatagcatttacaaatctttcagacacaaaaacaatacattccacctaagagttggaaatatgaaccattatactccaatagcaggtagtttctttttttttttttttaatttgagacggagtcttgctctgttgcccaggctggagtgccgtgacgcgatctcagctcactgctagccccgcctcccgggttcacgccattctcctgcctcagcctcccgagtggctgggactacaggcgcccgccaccacgcccggataattttttgtacttttagcagagatggggtttcaccgtgttagccaggatggtctcgatatcctgaccttgtgatccgcccacctcagcctcccaaagtgctggaattacaggtgtgagccactgcacccagccggtagtttctttttttaacatgctcttgattttttaaagaaaggctttataaaactaccatgatgcccccctcagactcacctgacaatttttaactcatctggcagatgctctttgagtttaaccagattagggcagaaacatttgggtagactgggaagggacttcaggtaactctaaggactgaaaatgaatcttgctctaacactattttccataatgtagagtttggtataaggcagggttatcttgaattccatcccacatgatttggctactgatttgcacaattcttctaagaactaggttacagttaggggccggtgacttggacttggattttgtttactaccagagactgtacaagtgtgtcaggaaataaaaatctcttctgttagttgtagttgtctgatcacgtaacactgggctatttatgggacaagtcagttagccaacaatgaggtgtaggggagtgccagttatctattttagactagtgcaatgctatagaacacttgagaagtgtattatttagggcttttaggcattaaggctgggatcactgtagacccaatttgacccaagacatcaaatttcagtggttgtgagttcaccaaaacacttagataaaagagctctctccagaagcaattccactttataatcaaacactggaagtcacttaactgcacaatgtattttttaatcaaataaatcatatcgcaagattttggaaaaccagaacagataccaaatcatgatttttggatgaaggataaggaatggatggccaggcatggtggctcacgcttgtaatcccagcacttcaggaggctgaggtgggtggatcacctgaggtcaggagttcgggacaagcctggccaacatggcgaaaccccgtctctactaaaattacaaaacaattagccaggtgtggtgccatgcgtctataattccagctacttgggaggctgaggcaggagaatcgcttgaatctgggtggcagaggtggcagtgagccgagattacatcactgcactccagcctggcaagagagccagattttgtctcaagaaaaaaaattatataagggatggatgaatgaaggtgcttaggcacttaagtatatggaagagtgataaaagaatgaagagaagaatctaggtgttagtattcctaagtagtaaagagtaagaagtaggccctcaccatagctctcaatgaatatgtgagtgataccaacagatacaaaaattctcttgcatctgcattcattaggtgaattgacttcagagacaaaagaaggaaagctatgaaaacttttatctccccagagactccttcccagcccactcaaataaaacggcattctggtcactctctatcctcttaatctgctttatttttcttatcatttatcaattcctgatattgatcatatatttgcttactgacttcccaccagggtgaaatcaccatgaacacaatgactttgttttgttcaccgtgctttctcctgggtctagaacggtacctggcacataagcatcataatttttttgttgcataaataaatgtatacacacaatttgaccgattctattggctcttttcaaagttataattgaacaatatatcagtatgaaacaccaaggcatgaaaatggaacagatttccatttaaataatcaattacaattttttttttttttgagacggagtcttgctctgtcgcccagactggagtgcagatatctcagctcgctgcaggctttgcctcccgggttcaagcaattctcctgcctcagcctcccgagtagctgggactacaggcacacaccgccacgcccagctaagttttgtatttttagtagagatggggtttcaccatgttggccaggatggtcttggtctcctgacctcgtgatctgccctcctcggcctcccaaagtgctgggattacaggcgtgagccaccacgctcggccaggagcacatcttattcacgactgtgtccccagtgtctagtacggtggcttgcctatggaaagtggtcaaaaaatacttgcggagcgaataaatacacaaacaaatatttaacattccctgctggtcaagcatatttaggagcctattactgttttaggaaagaaatactgtggtgatatactatgcatgtaggggtattaaaaaatgtcactctattttgccttaaattttagattatttcttagttttcatcaaagagtagaatgctgagctcttagaatttgtagaatatttttatgattctagttatgaacatgccataataattattttctaaaatagcatcccatttgaaggataatagctggtaaataccaagtggcaatcaccttattttgataaatacaatatagtttcactacacataagtgctttgatagagctggagagtagattctgctcactgctattcaaaagtgtaaaataaaagtacactaactagtacagagtcatttttattttactgttaaactgaaaattatctatatgtgaaatatgagatgacttactgagattatcattataaattctaaacacccagtttaggaaaaaaccaactgttctcccagttacgtgaataacacctagaagctatgtagtggttttttgtttgtttgttttttgagacggagtctcactctgtcgcctaggctggagtgcagtggcatgatctcggctcactgcagcctctgcctcccgagttcaagcgattctcctgcctcagcctcctgagtacctgggactacaggcactcaccaccacgcctggctaattttttttagtagagatggggtttcaccatgttggccaggttggtcttgaactactgacctcaggtgacctgcccgcctcggcctcccaaagtgctgggattacaggcgtgagccagcgtgcctggcagttaagtagtatttttcttcatacatgtcacaactcttcaccccattatcaggctatgtccacatgcctgatatgagtagcattcatctaaccggcattcatccttctaactggcattcatctagccatcgaacgctactctgcatctacaaagactgtacctctgtccccagtacccgccatcttctgcttatttacgggcagctccaatttcagtgcgtgatgctcagacaagggaagtagtttgttctttggtaaatcatcacaggggattctctaaagactgggaaatggattcacaatcttatttttaggccaaagatgagaactatttgagctcggctgagttgcactctgtgttcacagacatttcagaacaacctaagacagccctggatgcagaaccctgtactttctgaaggcataaagcacctacctcaaccttatatatctggatatacccatgggcttggagagccaaataaatcagtcgggccctcaggcacttgttaataaaagtttcaaagtctaatagctcataatgttacaggcttactgaaaaccataaaaatgaatgtccaccacataaataaatgatataagtgagtgggatttggaataattttgtctcagtcataaatatcttttctcagatgcttttcctttctaaaagtaaaatataaactataacaaagaaaaacattactctctctctgaagacttgtagaacactgtgaccaaggtcttgccctagctaaactgcagtggagagtagtgtctgacattagaaggcccactgtgtatctgccaactcagtgaatgaattctagtgtggggtgggagtagggggttaatatgaataatattatgcataatatgaataatatgaatccagcagatttggtctgctggattcatatgtataatttaaagcattttgtaattccgattctccatcctaccccccatcccagggccaaagtctctaaactggggttaaacttttagagatgatgctgaactcacctaaatacggttctgccaaagacagcctgttaagcctctctgtgcctcagttttcttatttgtacaatgggaataataatacttatgccccttagggggctgctgtaagaatgaattagttttatgtacatacctaaaacagtatctagctaagagcaggtgctctgtaagtactcactactgttcttactgttaccttaaacttacaaaaccggcttctttctcccatctctaattttaactcaatttaataaactttccaaaaatcaatcctccacaaatagctcttgctatccttctccttaaccaatatcctccagtataaacttttctatccatccatccatccatccatccatccatccatccatccatccatccatccatccgagacagggtcttactccatcactcaggctggagtgcagtggtgtgatcatggttcactgcagcctcaaactcctgggcttgagggatactcctacctcagccacccaagtagctaggactgtgggcacatgccatcacacctggctaattaaagaaaaaaacttttttttttttttttgtagagacaaggtcttactatgttgcccaggctggtctcaaactcctcacctcaagtgatcctcccaagtcagcctcccccagagtgctgggattagaggcacaagccattgtgcctggcctttttttttttttttttttttaaggcagagtctcgttctgtcacccaggctggagtgcagtggcgtgacctgggctcactgcaacctccgcctcccgggtttaagcaattatctgcctcagcctcctaagcagctgggattacagctgcccgccaccacgcctggctaattttgtatttttagtagagatggagttttaccatcttggccaggctggtcttgaacttctgaccttgtgatccacccacctcggcctcccaaagtgctgggattacaggctgtgctgggcccttttaaaagatggcattcctatttcttaatcaatttcactggcacaaggacttctgcagacaggaactcttgggaggtggtggtggaaaggcaccatgaagtctgttctctcatctttgaatgaaagaatggagaattgtgaagggtgagggtggtacagtaacagcaaggctttgattttgccctatgcatactaaactcttaaaaaaaaaagaaaaaagaagaggccgggtgcggtggctcatgcctgtaatcccagcactctgggaggccgaggtgggtggatcatgaggtcaagagatcaagaccatcctggccaaaatggtgaaaacccatctctactaaaaatacaaaaattagctgggcgtggtgccatgctcctgtagtcccagctactcaggaggctgaggcagaagaatcgcttgaacccaggaggcagaggttgcagtgagccaagatcatgccactgcactccaagctggcgacagagcaagactctgtctcaaaaaaaaaaaaaaaaaaaaaggagaagaaaactacctattccattccttctaatatgttgttgaacagagaggactaagccagcagggagccatgcctttacctattccttccaaggacatatctgacttttaataattaaagtacaaaaaacaactaatgaaatttgaagttttcatttattatactgctttatgaattattagcaacaaatatttcaattcatctaataaataaaaataaacttcagaaataggataagaaataaataacatttatcagtgttattattatcccccatccagatttaagagctagctaagcacttagtatattacttataacaagtgcttttatgaatctactctttatcctaaatccctcagacgtaggcactattattatccccgttatggatgaggaaattgagggtcatcaagattaagtagaattgtaacatggtgaaacagttttggaaaactatctggcaattctacaaaagggtaaacatagagttactacattatccagtagttccactcctgggtatatgcctaagagaagtgaaaacatgtgtccccagaaagtgggtacacaggccaggtgcagtggctcacgcctgtaatcccagcactttgggacgctgaggcgggtggatcacctgaggtcaggagctcgagaccagcctggccaacatggcgaaaccccatctctactaaaaattaaaaaagaaaaaaatgagccgggcacggtggcgggtgcctgtaatcccagctatttgggagactgaggcaggggaattgcttgaatctgggaggtggaggttgcagtgagccgagatctgtgccactgcactccagcctggatgacagggcaagcacagcaagactctgtctcaaaaacaaagcaaaacaaaaaacaggtacacaaatgttcacagctgcattattcataatcacctcataatcgccccaaagtggaaacaactcaaatgtccaccaaaggataaacagataaatatggataggaatggataaatacaatgaataaaatggaatattatgcagatgttaaaaaggaatgaagtactgacgcatgctacagtgtggatgaccttgaaatcattatgtaaagtgaaaggcatgcaagggaacatactgtaaattccatttttatgaaatatccggaataggcaaatccatagagacggaaaatagattgttggttgccaagggctgaggggagggagaaatggggaatgattgctaaaaggtaagggctttttgaggggatgatgaaaatgttccggaattagatagtggtgataattgtataactctgagaatatacttcaaagggtgaattttatagtgcgtgattatatctcagtaaagctatttttaaaaagagaaagaggtgaaacacttgctccagggtcggtccatactactaaggggtactatctgggctggacctacctgagaacctgcacttacttgcaccactgcaccaggctgcatgcatgttgaggacttaaggtggtttgccattttctatgtacttttctgcctgtttgttatatttcataatttaaagagagcaaagaatgaaaaattaaagtaagaaacctaatactgaggggctctgattttggcaaaggctagggctgggtgacagatcaaagagatgacgtttaaacattgcttctgatctgaaaagtacaaggcaaggagccagggttcaaaactgttaaacctatcagctccagtgaatgactaaggattctgtacagaatataaagagcaagttccagccaggcgtggtggctcatgcttgtaatcccatactttgtgaggcagaggcgggcagatcacctgaggttgggagttcaagaccagcctgaccaacatggagaaaccctgtctctactaaaaatacaaaaaattagccaggcgtggtggtgcatgcctgtaatcccagctacttgggatgctgaggcaggagaatctcttgaacctgggaggtagaagttgcggtgagctgagatcgcaccattgcactccagcattggcaacaagagtgaaactccatctcaaaaaaaaaaaaaaaaagagcaaattccctaattatgtttactgctttctgttgataccaacattattaaatatattaaatggtggtggtcacctagtacagcaatttttttttttttttgagacagagtcttgctctgtcacccaggctggagtgcagtggcatgatcttggctcactgcaacctctgcctcccgggttcaagagattctcctgccttagcctcctgagtagctggaattacaggcatgtgccactgtgtctggctaatttttggatttttagtagaggcagggttttaccatgttggccaggctggtcttgaactcctgacctcaagtgatccacccacctcggcctcccaaagtgttgggattacaggcctgagccaccatgcctagcctagtatagcgattttgagggacggaaaaatattcaatagcagcaataaaggattaagacttcattcatattaaaattggactaatatcaagtaagaaggctatcacatctagaagcaggttaataccagagccatctgctctttaattttttttttctaaatactaccctatatgcaatcaggaagccaattctctttttaaaaaatcacattattaaacagatgggaagagaacagaaagaataaaagcatttggctcacaaagaagcaaacaaggaaaaatgtgcccaggcaacatagagatgatagtattctgggaagacaatccgccattaatctttatgtcacagccaaatcactgcatattacaataggaagaacagagaatggaggaggggaaaagggtaagggagggaataaaggagaaggtagagaaaggatctacttactaaatataaaaatcaggtttcaatcagcaggttactatatatttaaaactctcatctaaatataggatataaagtcttggccaaagatgcacaatctcaaaaataaagagagtagactcagacaaggatcatcacagctactaaaaccattaggtgacagttgttggggaacagcatttagtctcaaagtactactcacatattacttattattcaaaggggaaaaggtgcatttctgtggataaatctggcggacaatgccttaaccgagtgatcaaacatccccaatcatggcataaactgacattatgtgcctccagatatgatttgctgaaaagaatacacaaactaaatcatgaagaaacaatcagacaaatccaaattgtgagactctaatcaatgatcccaccccccacccaaaacaggtggaactgttctaggttaaaggagactgaagagacacaaccaagagcgtaattcaaaaacaaaaacacgactgggtgtggtggctcatgcctgtaatcccagcactttgggaggccaagcccagaggatcactcaaggtcaagcattcgagaccagcctggccaacatggtgaaaccctgtctctactaaaaatacaaaaattgtacccccaaccctgtgctctctgaaacatgtgctgtatccactcagggttgaatggattaagggcggtgcaagatgtgctttgttaaacagatgcttgaaggcagcatgctccttaagagtcatcaccactccctaatctcaagtacccagggacacaaacactgcggaaggccacagggtccctctgcctaggaaaaccagagacctttgttcacttgtttatctgctgaccttccctccactattgtcctgtgaccctgccaaatccccctctgcgagaaacacccaagaatgatcaattaaaaaaaaaaaatgttaaaaataaactttaaaaaatatatgtgtttatacttaaaaaaaataaataaaaaaaaaatataaaaattagttgggcgtggtggcacacgcctgtagttgcagctactctgaaggctgaggcacaagaatctcttgaacccgggaggcagaggttgtggtgagctgagattgcgccacttgcactccaggctgggcaactgagtgagactctgtctcaaaacaaacaaaaacacccacagctctaaaggccattatatcattatatattagatattactttatcactgctaaatttcttgagagtgacaatggcattcaggttgcgtagaagaatgcccttgctgggagtagatacactgtcaagtatttgagggtaaatggccatgtcgtctgcatcttactttggcaggagaaacggaagagtgacagtggtggggagtgtgggaaagtaaatctaacaactgtgaacactggctcaacctaggtgaagtatatgcgagtactcattgttctattctttccacttttaagtcatgtacacttttttcaaaatcaaaatgaagggcaaacattccaaaaaagaaaaacaaagcaatgaaagcagaggtttgactctcactttgaaactgtccctggtggtcaataaaaatctggacttcttaggcgttgtgctgcagcttgcaggccaccagcatgcaagttgggctctcttgtgccatggtggcccacagtgtacatgtgttatcattatctccatgtccaaatccatggagataatggatttgcgatccctttgggaagaagctacatctgtatcactttccagatgactaaaagcacttgctgtagcccaaaattaatgaccatctgcattacggaaaaataagaaatgatttgaagctgccatgtagtcctatcttaccttcagaatttttttctttcttttcttttctttttttttttttgagacagggtctcactctgtcactcaggctgaagtgctatggcgtaatcactgctcactgcagtctcaacctcctgggttcaggtgatcctcctcccttagccccctgagtagctgggaccacaggtgtgtgccaccatgcccggctaatttttttttttttttttttagagatggggtcttgctatgttgcccaggctggtcatgaactcctgggctcaagtgatcctcttacctcggcctcccaaagtgctgggatgacaagtgtgagccaccacacccagccagcctcagaatttctagtgaaggtttatatttgtactgtaattcaagatcaactcatcttagaatctgtctcttggacaattcaaatcttttagttcaggaaaaaaactcctcagctactacaataccctgtttctatactgcttaaatgaaatataatccctttcctcttgtttgaaagttaaaaacaaacaaaacaggcaatttattaataaatccacacatgttaccaatattttccctattaaagttcatggcctccctcttaccattgagaattacagtgtttagtttctacctagcaaaattttctttgacaagtgccttgattcaggccaattcccagggatatataccgtcgggacaaacagaaataaccaaaatgtccaaaatagggggatgattagactataatgtattaatctaatgggatatggtgcaaccagttaaatgaaatataaaagctatgttgaaatataaaaaccatgtagacgcatttttaaatttttattttatttatttatttttttgagacagagtcttgctctttcaaccgggttaaagtgcagtggcacaatcttggctcactgcaacccccaccgctcgtgttcaaccaattctcttgtctcagcctcctgagcagctgggaccatagataggcatctgccaccaatgcctggctaattttttttttttttttttttttgagatggagtctcactctgtcacccaggttggagtgcagtggcgcgatctcggctcactgcaacctctgcctcccaggttcaagcgattctcctgcctcagcctcccgaatagctgggactacaggcacgcgccaccatgcccagctaatttttgtagttttagtagagacagggtttcaccatgttggccaagatggtctcgacctcatgaccttgtgatccgcccaccttggcctcccaaagtgctggaattacaggcgtgagctaccgcgcctggctgagtcttgctctttcaacagggttaaagtgcagtggcatgatcttggctcactgcaacccccacctctcgcgttcatgcaattctcttgtctcagcctcctgagcagctgggaccataggcatctgccaccaatgcctggctaattttttatttttatttttttgagacggagttttgctcttattgcccaggctggagtgtaatggcgcgatcttggctcactgcaacctccgccccccaggttcaagcaattctcctgcctcagcctcccgagtagctgggattacaggtgcccaccaccatgcccggctaattttttgtatttttaatagagacgggttttcaccatgttggccaggctggtttcgaactcctgacctcgggtgatctgcccacctcggcctcccaaagtgctggaattacaggcgtgagccaccccgcccagccctaatttttgtatttttagtagagatggggtttcaccatgttggccagcctggtgtccaactcttggccttgtgatcctcccacctcggcctcccaaactgctgggattacagatgtgagccatcacacctggcctgtagacacatttttttagagtagaaataaaagaatgttaaatgaaaagtgtatgcaacacgtatgcaagagggcaaatagagaaaggtcaaagagaagtgtaaacagttgttacatttaggtgaaggggctttttggtacaatttttgtaaagtttttgattaaattgtgtttaaaatgtaaaacttaagatataaatttaataatcaatggggaattggtactactgactatcccacaggaaccaagtttaaagagacataaaacacaggaagaaatatttcctaacatgataatatccaggttatgacactgtcttacctgggcagccttgatttaagtagaacattcagaattataaagtaaaaattcagaattataaaaaaattttaattttaagtagaacattcagaattataaagtaaaaattcagaattataaaaaaattttttttaaaatgcaattctttcactttcaaatatatagtgccttaaatgtgttttcaaatagtgatttaagactgttaatagcagattaatttgtaattctgacatatatttatatatattagtggccctctttcatctttgatgtgactaagcaaacttgtaccaactgtaaatagaacgaaatacacagaaagtcactcacaacggtaccagaatttctttaaaataaaaaactttctagctgggcatggtgactcacttctgcagtccaagctactcaggaggctgagacaggagcgctcccaggaggtcaaggctgcagtgagctatgatcacgccgctatgctcaagcctgagccacaaagtgagaccccatttctaaacacaaacaaacacatcccttacctctaatcacatacctgaacacaactggcttacgtgaaggccgttgacagttcaagagtaacaattcaaggtgtctagaaagctatcattacaagagcagatcacaggaaacctcagctgttggttcctaacttcgctcctactcaaaggccaacagaaccggggagaaatcttcctgttttgttgatatcaatttattttgtgccaagaacctatacctaaaaccaacgcagggtttgtattccccctggattcttcattaccccaggaaagtggaacagatcagaccagtttccaagaacagaagcactgcagggcaatcttgctaagggggccctgagatgtttctctctgtactaatctctatgtcttttatgtacatcaacacaaaccttcacccaaccatctctgccatcaacagcaaatctagggaagagaccaataataccttagaaaagcacacctatccaccgaaccaaaactaaatacagaaggatatggcagtttgccccgttttccaggtagctgtgttctcttaatttgccatgaattaaaatgtttcatttttacttagacataacttgaatatgtcatttcaaataacaaaataaaaactgaactgaatatgttttagttaaaacaatacaaaactgaaatctcctcttttaagagagaaacgcttcatcagctggttagttcccttgtttgcttactgggtgatatgaaacccaactacagctttccaaaaataatcccaagttgtggggtgtcctactacctgtgtttaagtaaaacaagtcctgcagaaaaagtggatccaacgagtagcaggtttgttaagaagctaaatcttggccaggtgtagtggctcacacctgtaatctcagcactttgggaggctgaggcaggaggatcacctgagctcaggagttcaagaccagcttgggcaacatatcaaggctctgtctttacaaagaaagcaaaacaaaaagtagtagcgtgtggtggcgcacacctgtagtcttagttacttgggaggatgaggtgggagaatcacttgagcctaggagttagtagctgcagtgaactatgattgcgccactgcatgccagatggatgacagagccagactcattctctaaaaaaaaaaaaaatgtatgagaaaaagaagaagataattctgggccaggcacagtggctcatgcctgtaaacccagcactctgggaggccgagatgggaagactgattaggccaggagtttgaaacaagcctaggcgacatagtgagactccatctctacaaaaaatttacaaattagcccagtgtggtggcgcatgcctgtagttctagctactcaggagacaggcagaagaactgcttaagcccaggagtttgaggctgctgtgagccgtgattgtgtcgctgcactccagcctgggtgacattgtaagatcttgtccaaaaaaaaaaaaaaaaaaaaaaatcttattctaattctgagaagaaatgacatttaataagagctcatgtcttagcaaatcaaaatgtttgtcctgctggggaaaaaaaaaaaacaacaacggttatccaggtataaaaagcaattaccaggacatttaacattaagatgaactaaaattgtgcacaaaataattgtccacatttactacagcactcatagtgggagtaaataaaatgcaattacttttgctaaagcaacctactttttctggtaacagaccgtctctcactatacctctaatagtagatctacacacaacttagcatggtgtaggaacttgagtgcatgctcctacagcacacaacagatgcactgaaaggctcccacctcttaactaacagcttatgctgcaaggcatcagccaggataacggcagagcccttctgtgtatgtgttctttcacaggcggcactgttaccggaagaagcgaagagcagcgatttccttccaaaaggtcagctgcctcagacagaccaaacagaaagcagcgaattcttgccaacttcccctcctgcttctgcagctagtacgcaatagcatttagtttccagtaaagctccagataaaaacaaagcaaatgtgagacccagaatctacacaatgtcagtgtctcgcttgactgaacgaagggcagtaagatcatatggagctacgctttttcaacgtggtggaagtgttaggaaggtgagattaaacatgaagaaaaggtcaggactggaaccatccagattttataccaatgtccagaagtctccatctaaaaataagatggtaggctgggtgaggtggctcaggcctgtaatcccagcactttgggaggccaaggccagtggatcacttgaggtcaggagtttgagaccagtctggctagcatggtgaaaccccgtctctaccaaaaatatacaaaattagctgggtgtggtggcgcgtgactgtaatcccagctactcgggaggctgaggcaggagaattgcttgaacctgggaggtggaggtagcagagagccaagattgcaccactgcactccagcctgggcaacagagtgagactctatctcaaaaaaaataaaaagaaaaagaagatggtattttagagataataaatgcaacaacagataaggtccctagtcaactgataaaaaaagaataaattttgaacttattctcaaaataaagtcaagtcagtcattctgcaacatgctagggcacaggcaaggttcaatgctgacaaccagtagatatatatacaatgaatatataagtttcttagattagacatggagaaaagactgtaaaacacataacaaaaaggggaagaggatagaaaatataatttttttttttgagacagggtctcaccctgtcacccatgctggagtgcagtggcgtgatctcagctccctgcaacctctgcctcccaggctctagcaatcctcttgtctcagtctcctgagtagctgggaccacaggtgtgtgccactatgcctggctcattttttgtatttttagtagaaacggggcttcattatgttgcccaggctggtctcgaactcttgaactcaagcgctccacccacctcggccctccaaagtgctgggatgacaggcgtgagccactgcaccaaacccagacttctttaaattaagagagtgttaaactacatgaaagcctacgcattcaatcttcccagaggagcaaaattagacccttttgagtataaaagtgaaggagaaggaagggaaaatgatgattttaaacatttttctcaaccagatcggttcccggcttaactatctacacaaaacttgcgagaaaatgttacgagctcctaccccatgtcgttggctctatgtggtttctaactcgttagtttcaggttgtggtggcaacagagacaccaggctttttgtgagacaagctcttgttctaaaatgtctgggctttgatgatggagagtattttaaccccactctgagaatacctagtttgaaatgaagatagtatggagttcaaggaaaaacgtattagtttgttatgttaaattaagccacccacacacccacactagaaactgttttgtgttggaaacaaaataaatgacttcatttccaagcccttcctatacttcatcaccaaaccttaaataatagcaaaggaataagcatgggaaatgagaaaaataaagtactagcagcagtagtaatagaattataataacagtagtagtaataaatattcaaggagttttgtccaccttcggagctcaggctgtgaaccacagtggtttacttattgaaaatcatcacgaggccgggcgcggtggctcatgcctgtaatcccagcactttaggaggccaaggcgggcggatcatgaggtcaggagatcgagaccatcctggctagcatggtgaaaccccatctctactaaaaatacaaaaaattagccaggcgtggtggcaggcacctgtagtcccagctactcgggaggctgaggcaggagaatcacttgaacctaggaggcggaggatgcagtgagtggagatcatgccactgcactccagcctgggtgatagagggaaactctgtctcaaaaaaaaaaaaaaaaaaatcatcagctagtcaaatgagtttctcctgacagtgatacctgcagtttaactcctttataacacgagccacaaaatgaattatcataaaatgcaattcacaaatgaatacaaaaagattatttgacaatccaaaaaaaaaggctttaaataagactcccttccctgagggttagcactaagaagacaaaccttcaagcacaaccaaaggatgccatatttggggggtgggggttcaccttcattcttttaaatcaatcagaaattagccaaaagctttagattgtaaaagtgagtgggaggagaataacgagaactgtcctgggcttgggtaactttcccataaggccaaaacctagatcctgaccacttgtggtcagaattagcaatgcaacatttcctataagaagctgagttgttaactttgttaaacttgttcgcaaattccttaaggggcttccattagttacattattatccatcaccaatatttatcacagaacatctgaaacttaggctttctaatggcagaaaacattttacatacagggggaaatgtcattaatagaaatgagaaagcaacttgtaaaacaccccagtgtgtaagacaggataacaaaggatactgaagttagctgccatctggatacctgttcacatgatacctataactaaacagcaacttacctgatgctactgtgcattgggttggagacaaggtatacatgataaattcctactataattaataaatgttcaaatgaaaatatacaaatagattgggtgcggtggctcacacctgtaatctcagcactttgggaggccaaggtaggcgaatcacaaggtcaggagctcaagaccagactggccagcatggtgaaaccccgtctctactaaaaatacaaaaaattagctgggcgtggtgatgcgtgcctgtaatcccagctactggggaggctgaggcaggagaatggctcgaacccaggaggtggaggttgcagtgagccgagatcgtgccactgcattccagcctgggtgacagagcaaggctccgtctcaaaaaaaaaaaaaaagaaaaaaagaaaagaaaatatacaaataactatgttactgttgatgtacattaagtatgagttgaatgctagaagatcatctgggttctccaagctatgccatcaagaaatagacactctgatacagaaggcaacttctgaatttaacagtgctgtgcgatatatcaaggggaaatttgggacaaggatgcctggcagttccacaagcctaggaaaagtgcctcaaacaatctttaacacctttaggtagaaatagaatcagtacaatatttgtatccaatgtctttgatcattttgataatcttatttttaaaagatgggatgttttcctcctctagaattagaatttaccctacactctggacataagaaccaaggcaactaagttatctgctggccaactaatagactgtaagccatcctggagcaaggaccatgtctctctgattcattttgatttccccaatatagtacttgatatacatggttggtatttagtaattgtgtattgaatacaatttttatagacctccatgttacaaaaaggacctaaattgggggaaatggatggtaggtcagttatttccttcaggatatttttaacactgtggaggtcattaatctgaatccttattacaggaataatgggagtgaatcacactttatagaaaccatgacggaggttttgactcatcattggtgctaatcaaggtaaacataatagcaagttgtgccaccctcataaacatcgtgacaagtttgtaaaatagagctaacactttattgcagcaatttcaaagagaagaattacatgaaatatgatgatgctaagatgagctaaaattccaaagaaaggatcttctctaagcaaactaacctttcttttaattatatctcaagaaagaagctgagtataaacgaaaagcacatttgtcaacaattcactcattcagttaccatgtatgccactaactacaatccagaaagatttatgattgtgccaaaacaagatgatgaggttctatacccagaatgtagattaatgttagaaggatgactcaggacttatggcatcagtctgatagacgttgaacctttctttctttctttctttctttctttctttttttcatctctgtgagttcttcaactacaggacagaatgccaactcaggaagataattcagtaaacacagccacctttgactacagactattttttatccaagatgtatttccatgtagcaaagtaaatttagcaaatgaaaatatagtcttgacttgctatggatgtcccctatctctgccaaaaatgacaagctgcttgctcaaaagctgtcactaattagcagctgctgctgtaaagaaaaccaaagtaagtgccaataaaagcatattgaactcaaagagggccctatgacaagagatgggaaatgcaagaatctatttgtgactagtaaacttacataaatactagcaatctaaatttgggagatgtaggggcagggcaataatggcaatacatatccattcatatttaaacaggaaggactgaaagagtctcctaacatcctgaaagtcagaaataccaaggtattggtgttgctgaattccatcacaaccatttccacctttccaataggagccagtcttggttttggatgatgatgattatttttagagacagggtcttgttctgtggcccagactggagagcagtggcatgaacacaactcattgcagcctgtgactcctggcctcaagtcatcttgccacctttgcctcccaaagtgctgggattacaggcgtgagtcaccgcgcctggcctggttttggataatttctcattgtcaatacttctgtctctggcactttaacaactgcatttgtagacattgtaaaaataaattttaaaaataactttcatattctatgggcttcggcctaaactctgatggttccgaatctacctgttgacccctcatgttataggttgaaactatgaagtcaagcagaagtgatctgcccaatgtaaatgagcacagatacagtggtagaaaatcactttactagccctatttcaagaggctctaaaggagtccacaacatcccagcactttgggatgctgaggcaggaggatcacttgaggccaggagttcaagaccagcctgggcaacacagcaagacctcatctctacaaaataaaaattaaaaaattagccaggcgtgctggtatgtacctgtaatcctagctactcagaaggctgaggtgggaggatggcttgagcccaggagtttgaggctacagtgagccatgactgcaccactgcactctgtctcttaaaaaataataataataaagtagtctacagcccaagatcctgctttaaagctaaattccatagattacttttcaaatcatccttcgaagctgtcctctctttgttcctatcagtcagaactcccagtatatttctctttttcctcaacaagttagtttctgtccttaaaaaaaaaaaaattaagaatatttccccttcattttggttctcttactctctttttctctctccctccaggtgaactgctagagagctatgattgtttcatctatatttggacccctagggtcaggctgtgtcttcagcaactactcagaaaaatgagaatgaaaaagaaagaaaaaaggaagaaagagagagagggaaggacaaactggaagggaagggaaggaaaagtagggagaaaggaagatgtaatgagaatagaaaatttttaaaaatggaaaaaaaaagaaggtcggtgcggtggctcatgcctgtaatcccaacactttgggaggcctaggcaggcggatcacgaggtcaggagattgagaccatcctggccaacatggtgaaaccctgtctctacaaaaaatacaaaaattagctgggtgtggtggcatgcgcctgtagtcccagctacttgggaggctgaggcaggagaaccacttgaacccaggaggcagaggttgcagggagccgagatcgtgccactgcactccagcctggcaatggagcgagactccgtctaaaaaaaaaaaagtttcttaactgtcgtttcttaatgacacgcaatcagaacctcccctgcagctgaggtcccctgtggagagtatgtctcattgtctgtataaacaattacaacaatgtacctgtaattttccagttcataatcaggctgtaagaatgagaacaatttgttttatgaaacatggagaaagactaatctttgctattactctcagtgcaggtttatcagcaagacttggagtagataagccacaggcatacagatgaggaatcacattttgaaagctttaataactccctagtggtatgcaacaagctgctgaattaacttgtctttgcatactcattgcacatgcatcactggccaggtctaggtacaaagcaaaaactaaacaatcaaaggaaagaaaaactgtgaagtctccaaccaaaagaattatgttgcaaaaaaaggaataaacacaaaggggcagatagtgtatgattccactgatataagatgcctggagtagtcaaactcatagagacagaaagaatgaatggcggttgtcagagcctgcggggaggggcaaatggagagttttattctcattactgtttaatgaatacaggattttagtttaggatgaaaaaattctggagatggaccaggtgctgacggtcacacaacaatgtgaatgtgcttaatgccacggaactgtactttaaaacagtgaaaatggccgggcacagcggctcgcgcctgtaatcccagcactttgggaggccgagggcggttcacctaaggtcaggagttccagaccaccctggttaacatggtgaaaccccacctctactaaaaataccaaaattagccaggcatggtggcgtgcacctgtaatcccagctactcaggaggctgaggcaggagaattgcttgaatccaggaggtgaaggttgcaatgagctaacctccagcctgggtgacacagagaaactccatctcaaaataaaaggttaaaaatggtaaattttatgatatatatacgtaactccacaatctttaaaatggggttaaaaaaccagtttttgcctaataaactcacattttttctatctttaatgctgaaatccaaaggaaacaaagagatatttgctgtctcctctctcttctcccccatccccccaactttttttgagacagcgtctcactctgtggcccaggctggtctctaactcatgggctcaagtgaccctcctggctcagcctcccatagtactgggattataggcatgagccactgcacccagccccctctcttttctttcttccacagtaaaaggcacactttcagtccttctgagggttgaagttctctggatacacctgctgtattgagattaaaggggaatacaatagtctttccttatctgagattttgttttctatggtttctgttacccacagtacagcatagtaagatacagtattttaagatagactacattcggccaggcacagtggctcacgcctgtaatcccagcattttgggaggctgaggcgagcaggtcacgaggttaggagatcgagaccatcctggctaacatggtgaaaccccgtctctactaaacaaaatacaaaaaattagccgggtgtggtggcagatgcctgtagtcccagctactggggaggctgaggcaggagaatggcatgaacccaggaagcagagcgtgcagtgaacggagattgcgccactgcactccagcctgggtgacagagcgagactctgtctcaaaaaaaaaaaaaaaaaaaaaaaaaaagactacatacttgttctattttattatcattgttcttaatctcttactgtgcctaatttataaattgaactttatcataattatatatgcataggaaaaaacaatatatatatgtagggttcagtattacctgaggtttcaggcatcccttgggataaggcaggactactatacttatttaacagatacttattgagtaactattacatgttgggctctgttctaggtactaagaatgtggcagtgaacaaaacagacatgctttatgtaacttagattctggtatgtaatattaaatactttaaagtttaaataaataattgtgcccctgctacactttctagtttttgtttttattcttcttctctttatttctgttgggagaaaacagataccacctgacaattgaatcttacaggtcaatgacaaagtctgtgtgttcaaaccagtatctgggaagaagttttaaaagcacctccacaacatcaaacagggggattactggcttttgtgaagtcttggtgatgcaaaagcaatttctgataaaaccagaacatctgttcatccctgctgaaagcctatcatctttatggagctattgtatgtgcaaaacaaatcgggtccaatcaaggattccacagttaagatcatttcagtgtggcattattccagctttggtccaggacatacagttttatttacaggataactttcatgattgccacaatcaaatcaaatcctttgtctttcaaaggtgatttgcagattcaatcttcacaaagcactaaaaatatagagcatggagttaaaaattcacaatgggaccacacacaaatagcagtacagggtggtagatagctagccaatgtttactttcttctttttcccatagaataaaatataggtcaaattctactaaaacaacaaataccaccacagtgaaaacctaggtataacaaaaatattttgaaacacttaaaaatgtccatgtgtttcttaatccaacacaatatacttttatagaatcaatataatgaattttatgagagtgctgaatcctaaccactagacaaccagggaattataatgaattttaaatcaaaagaatgactccttagagcataacaactttgtgtccgctctttaattttcatctttagggacatattttaaatatttcaaaataggctgtcacagtatatttggaagaaaggaatttgtttccctttatggaaatcatcctcaaatgtattgaggaataattttacattcaataaattacatcaggatgtttccaatgttataatgaacctacttttggcaacatagtaaaataaaggggttcctaaagcccacccattagtaaaagttattgaatattttatttaacattaaaaggtcaactaatttggcttagatgtcaggcaatatccaaagaaacacagaagttctagccatttcttcaaaggttccttctgaaatcaggtatcctttaaaaagaccattaaggctgggcacggtagcttatgcctgtaatcccagcactttgggaggctgaagcggaaggatcacctgaggtcaggagtttgagaccagcctgacgaacatggtgaaaccctgtctctactaaaaatacaaaaattagctgggcatggtggaacttgcctgtaatcccagctatctgggaggctgaggcacgagaatcacttgaacctgggagacggaggttgcagtgatctgagatcacgccattgcactccagcctgggaaacagagcgagactccgtctcaaaacaaacaaacaaacaaaaccattaagataaactaagtaggaagtggcattacctagattccagaatctctgcaagtctcccttctgaagctccgtttgttcagtattcctcacacagtggtgttaccagtcatggtgtgaacttggcagtttagggaggctaccacctcacctagggggaactaaaaatgattcccctcccttaagtatctcctaagactacagcaaaactggggggaactctcttttgaaaggaaaaatttcatctgtaactagatccccaattttaagcatcaacttgatgtattttataaaaatgaagagtagctaagaccaaaaggtgaatatgattcttttctagacaaattcagtttcaaaaataaagttaaacaacactctgaaacaaaacaaaaataacaaaacaccctgcctaaaagtgatttgacagttgaggtatacctgaaacagggtgggctgtttatttttattcagaattttgttttcagagatgggatctcactatgttgcccaggctgacttgaaactcttgggctcaagcgatcctcccaccttggcctcccaaagtgttgggattacaggcgtgagccactgcacctggccagagagggcttttctactcccaagaaatgagaggtcctctgaaagcaggagcttcaaggacatgggtaatgcttcagccatgcaaggatgcagcagttttcaaacaagagggtgcatctgtgggtgtctgggtgtgtcttgggggtgagggaatggtaggaagctttaagggcatcactttctttaggtaagagacacttttgtgctgggcgcggtggctcacgcctgtaatcctaacagtttggaaggccaaggtgggtggatcacctgaggtcaggagtttgagaccagcctggccaacacagcgaaaccccgtatctactaaaaatacaaaaattagccgggcgtggtggcaggtgcctgtaatcccagctacttgggaggctgaggcaggagaattgcttgaacctgtcggggggaggcttcagtgagccaagatcatgccacttcactcggcaaaatagcgagattctgtctcaaaaaaaaaacaaaaaagaaagacacttttatttcctacagagcagtggcttcagttcccacagggcaagagaccctatttgttttgttttattttaagttccaggatacatgtgcaggatgtgcagatttgttacacaggtaaacatgtgccatggtggtttgctgcaccaagcgaccctatttgtatttgttgattgtaagccagatgttataaagcaggagacagccctatatttcatttcccttcgttagaaggcctatagccacactgtttattatggtagcctctagcagcatgtgctacctaagcacttgaaatgtagctagtgcgactggggaactgaattgcaaattttatctcatttgaattaacttaaatgtaaacctggaaactggtgttcaatttaatacttggaaaacctttcagtacgtttggaacaccttcagtatgtgaatctactttatcaactgaaagttttatgaaatctgaacacagttcatgcatttctggtgaaaatttggtggctaaattgagagattttataactgtaagatacacaccagattttgaagcattcgtacaaaaaaaggaatgtaaaatatctcagtgtttttgtgggcttttgggttcgtttgtttttttttgagacagggtctcactctgttgcccaggctggaatgcagtagcacgaacacgactcactgcagccttaacctcctcggctcaagtgatcctcccaccttggcctcccaagtagctgggactataggtgcacatcaccatgcctagctaattttgttgttgttgttgttagagactgggtctcactatgttgcccaggctggtctcgaactcctggactcaagtgatcctcctgctttggctccccaaactggcccaaaatacctcattaatcaataatttttatattgatcaaatgttgaaatgataatttttatatattaaagtatattgttaaaattaattttatttttactttttattgtgatacagactaagaaaattacaattggagctcacattatatttgtattgaacagtgctggtctagaacataaatattccacatactgtacacaattattgcttagtttcctagtttatatgtcttaccttttttttttttttcttgagacagagtctcattttgtcgccgaggctgaagtgcagtggtgcaatctcagctcactgcaacatctgccacctgtgttcaaatgattctcctgcctcagcctcctgagactacagacatgtgccaccacgcccggctaatttttgtatttttagtagagacagggtctcaccaagcgggccaggctggtctcgacctcctgactcaagtggtccgcccacctcagcctcccaaagtgttaggattacaggcataatccaccatgtatggccagaaaacataattttgaattaaacgagattatcatgtttttaggaagtagaggaggtaagaggtgataagcaaaaaataaccaaaaagaagagaatgatttatttatgtaggcatattgaacaatatatgtttatagttttatctttaatacagaaaaacacttatttacttcatgcattttaattaactactttatggatttaggttttaaaagcactaaaaagtactacgtgatttttaaaaatgttttggtattccccaaactggcttaaaataaaattctgttatagcaatttcactataataaattacaatgcacaatccaagttaagatagattttttattttttatttttatttatttatttttgagacagggtctcactctgtcacccaggctggagtgcagtggtgcaatctcagctcactgtaacctctgcctcctgggctcaagccatcctcccacctcaggctcccaagtagctgggactacaggcacacaccaccacgtctagctaatttttgtatttttatagagatgaggtttcaccatgttgcccaggatacttttgaacccctgggctcaagtgatgagcccacctcagccttccaaagtgctgggattaaaggcatgggccaccatgcccagccagatttttttctaatataaaaataaagatgggatctcattacgttgtccaggctagtctcgaactcccggcctcaagcaatccttccccctcagcctcccaaagtgctaggattacagatgtgagtcatctcacctggcctaaaatagatttttacttaattaaattttacatgaaataagtaagtctactgggctcaaaattgtctatttttaaggttgtaattttatttaaattctcttaaagtatcaactcataatttactttcattcctcttctttaaactctgtcaagtgttaaaattcttttatttttattctgagacagggtctttctctgtcacccaggctagagtacagtggagcgatcacagctcactgtatcctccacctcccaggctcaagcaatcctccgacctcagcctcctgagtagctggactataggcatacaccagcaccccgtgctaatatttttatttttcgtagagatggggtcttgctatgttgtccatgcaggaaaattcttttaaacactaattctagttacaaagaaactatttaatgtaaatttaattaaggcagaacataaatctctggtattaggaatgacttatacccaagagaaaatatctttcactagagatttcctttaccagatattcccaaatgagtaccataataaacatttagagaagtcattaagtgtgactaatggaattataagaaaaagaaatccatagcctagcagccttcataggtatcaccatgaaggggaaaagccaatgcagaaaatatattgaaataatacaaagttcagggttaaaacaaactcaaccatttttttcaaaacatcttcaatatgaaatgaataacttagcagagtgtgtatatatatgtgtgtatatatatacatatatgtatatatatacacatatatatgtgtgtatatatacacacatatatatgtgtatatatacacacatatatatgtatatacacacatatatgtgtgtgtatatatacacatatatatgtgtgtatatatatgtgtatatatatgtgtgtatatatatatgtatatatatgtgtgtgtgtgtgtgtgtgtgtgtgtgtatatatatatatatatatatatatatatatatatatatatatataaaaaaacaaaaacaatttttttttttttttaaagagagacagggtctctgtccattgcccgggcttgggagtgcaatggcaccattatagctcactgcagcctccacttcccaggttcaagcaatcctttcacctctgtctccctaacaatttattatattatataacaatataattctccataagcttctgtgtaaaaatatacaggctaccacgaagcacaggaaataacacagtcctgaagttcaaattatttaaactctaaaaatgttaaatgaaattatgatgattttaacatagttcaacaaaagatgtcaaaaaacaggatactataccaaaaaattaacaaaaacatcacaaactcttttttctgcttctaaaaagaaaacactgataacaaaaaacaaattctacgttctaagacatatcaatacacacagccattttaaagataacttttttttcctgattacaaaaggattccctgtattatcatctgtttttttgtttgtttttatttgttgtttttgagacaaggtctcactctgtcacccaggacgaatgcagtggctcaatcacagctcattgcagcctcgaactcccaggctcaagtgatcctcctacttcatcttcccaagtagttgagaccacaggcatgtgccaccaggcccagctaattttttaattttttgtagagatagggtcttgctatgttgcccaggctgatcttgaactcctggactcaagtgatcctcccacctcagcctcccaaagtgctggaaatataggcatgagtcactgtgcccagccataatctgtttattatagaaaaatggaaagatactagaaagcgcgcacacacacacacacacacacacacacacacacacacacagggaactccacgacccagaagaaatcttttttcagcgcctgttcttttttccaggcacaattgtatatgattgtttgtaatttcatttttcatttagtaatatatagtgaattttgtgtaggtcattaaatattgttttataacataatttaaatagctggacagtattctattggacagctatacacaggtgtaataaatgatttagtttattaaacctctaatggaaataccaagatttttccaatttattgctattttaagtaacactccttttgtacaaatcttttttttttaatttatttattattatactttaagttttagggtacatgtgcacattgtgcaggttagttacatacgtatacatgtgccatgctggtgtgctgcacccactaactcgtcatctggcattaggtatatctcccaatgctatccctcccccctccccccaccccacaacagtccccagagtgtgatgttccccttcctgtgtccatgtgttcccattattcaattcccacctatgagtgagaatatgtggtgtttggttttttgttcttgcgatagtttactgagaatgatgatttccaatttcatccatgtccctacaaaggacatgaactcatcattttttatggctgcatagtattccatggtgtgtatgtgccacattttcttaatccagtctatcgttgttggacatctgggttggttccaagtctttgctattgtgaatactgccgcaataaacatacgtgtgcatgtgtctttatagcagcatgatttatagtcctttgggtatatacccagtaatgggatggctgggtcaaatggtatttctagttctagatccctgaggaatcgccacactgacttccacaatggttgaactagtttacagtcccatcaacagtgtaaaagtgttcctatttctccacatcctctccagcacctgttgtttcctgactttttaatgattgccattctaactggtgtgagatggtatctcattgtggttttgatttgcatttctctgatggccagtgatggtgagcattttttcatgtgttttttggctgcataaatgtcttcttttgagaagtgtctgttcatgtccttcgcccactttttgatggggttgtttgtttttttcttgtaaatttgtttgagttcattgtagattctggatattagccctttgtcagatgagtaggttgcgaaaattttctcccattttgtaggttgcctgttcactctgatggtagtttcttttgctgtgcagaagctctttagtctaattagatcccatttgtcaattttgtcttttgttgccatcgcttttggtgttttagacatgaagtccttgcccatgcctatttgtacaaatctttaaacatatttcagatgtcctagaatgaaattcatctaaatgaaactgctaagtcaaagggtatgtactcttcttttttttttttgagacgaagtctcgctctgtcaccaggctggagtgcagtagtgtgatctcggctcacagcaacctctgactccctgcctcagcctcccgagtagctgggattacaggcacgtgccaccatgcccagctaatttttgtatttttagtagagacggggtttcaccatgttggccgggatggtcttgaactcctgacctcgtgatccgactgccttagcttcccaaagtgctgggattacaggcctgagctcccatgcccagcttgagtatgcactcttttaagctctcaatacatgtatcaaactgccatccaaaaaaagcacccatttacatttcaaccaatgagtatgaaagtgccagtttcccacattcccaagcaacactgctcttatttttcaatatttttagtcttcataaatctgttaactgaaaaaacttgtcatttttatttgcatttcttgatttccagtatgggtgaacactgtttcatatgattatcggctatttgtagttcttcttttgttcattttctattatgggaatcatctttttcttactacttatatagattacttatatattacgaatatttacccataatgctttgtcatatatattagaaatatttttcttattttgtcacttagctttggtttctggcattttttggcataaagaagttttaaatatttatgtatacatataaaaagacatatgtgtatctataagatgtatcttcttttattagttattaaagccacttatatcctgttcaaatttaccaataaaactggaatgtaatgttaagttctgtgcaaactagacctcttcacatttgggtaataaaaattcaaaactagccaggctcaggggctcacacctgcagtcccatctactctggaggctgaggtgggaggatcacttgagctcaggactttgagaccagcccgggcaacatagtgagaccccactctttaaaaaataataataataaattaaaataataaataaaattcaaaaccataaattttgagaatatcacatttttggacaaaattttaaatgtgtgtctaaagtaatacgttttcttacttaaggacccactcctggcacacttcactcatcctgggcaacagagcaagacactgtctcaaaaaataaaaaaaaaaaaaaaaaaatcattcccttaaaattatatgctttttggcccggtgcagtgactcattcctgtaatcccaatactgtggaaggttgaggtgggaggtgtggaggtggaggtgggagggatcacctggagacatagcaagacccctgtctctatttttttttaactatgtgcatttttctggtattgcaaagtcaagggatcttgcctcatcaccaactcagcatgtgaattgtagccatgccactcaggaagccaaatattttctattttgttttgataccttcaacatgaggagaaaggccaatctcttcatacattacaatgaaattagtatttttacttgatatttaaactcactgcaagataaactcatttgtaaaacatgactacactcagagtttccatatatgtagtcaggcaccacataatgacgtttcagtcaatgacagaccacatatatcactgtggtcccataagataataaaacgtagctgaaaaattcctatcctctagtgacgctgtagccatcataatgttgtaatgcaatgcatgactcacatgtttgtggcaatgctggtgtaaacaaacccactgcactgccagtcatgtgaaagtctagcacatacaattgcgtgcagtacatacttgataatgataataaatgcctatgttactggtttatgtatttaccatactttttatcgttattttagagtgtactccttctacttaaaaaaaaaagttaactgtaaaacagcctcaggcaggtccttcaggaggcattgttatcacaagagatgacagctccatatgtgttactgcccctgaagacctttcagtggaacaagatgtggaggtgcaagacagtgatactgatgaccctgaccctgtgtaggcctagactaatgtgtgtgtttatgccttcacttttaagaaaaagtttttaaagttttgaaaaattaaaaagtttttaaagttttgaaaaattaaaaattatttaaaaagagaaaaagtaaaagaataaaaacataaagaaaatattgttgcacagctgtacatgtttatgtgttaagctaagtgttactacaaaagagtttaaaagtgtaaaaaagtaaacagttggccgggcacggcggctcacacctataatccgagcactttgggaggtcaaagtgggtggatcacctgaggtcagaagtttgagaccagcctggccaacatggtgaaaccccgtctctactaaaaatacaaaaattagccaggcgtggtggcacacgcctgtaatcccagctattcgggaggctgaggaaggagaattgcttgaaccgggaggtagaggttgcagtgatccgagatcacgccactgcactccagcctgggccacaagagcaagactccatctcaaaaaaaaaaaaaaaaagtaaaaagtttacaaagtaaaagtattacagtaggctaaggttattattgaagaaagaaacaattttcaaaatacatttaatgtagcctaaccagacagtatttttaaaatctacagtaatgtacagtaatgtcctaggccttcacattcactcaccattcacccactgagttgcccagagcaacttccagtcctgcaagctccattcctgttaagtaccctatatagatgtaccattttttatcctttatgccatgtttttactgtaacttttctatatttagatatgtttagatacacaaatacttacccttgtgttacaattgtctacagtactcaatacagtatacatgttccacaggtttgtagtctaggagcaataggctttatcatacagcctaggtgtgcagtagggctcaccatctacgtttgtgtaagtaccctctatgatggtaccacaatgacaaaatcgcctaatgcatttcttagaactttgtcaccatgtatcattaagtgacaaacgactatagttacgtaacaataaccaaagaaaaatacaaaaagagggactatttacattgtatccttacatattaaaccttccatgccttcggaataagaatctagtatccagttctcactatacatagctttccctcactttctatcagaaatgagataggagtcccaccttcctggcatcagaaacagatcaccaatcctgcaaacaaattcacagggtgaactgtttcatttttaaagagctgtagatttctgtagatctctaatttgctacttttcctaaacctaaaagatgaccaaaagatttttagaaacattaaacaaaaaaacagaattagcattatttctaacagaacattttacctatttaaatatactgtagaatgaatgctatattacaaagctgatgaattccaatttttagtactttaagagatcaagtgttcaagtttctttttatataggctacaatgacatgtatgaatgtaacttaacatttagcccaggttagattttttaaaatcccactccttcaaaaacagtgacttgccaccagctataggctctgaatttatttaatttatttatttttttgagatggagtctcgctccgtctcccaggctggagcacagtagtgcgatctcggctcactgtaacctctgcctcctgggttcaagtgattcttctgcctcagcctcctgagtagctgggattacaggcgtgcaccaccacacctggctaatttttgtatttttagtagagacagggtttcaccatgttggccaggctggtctccaactcctgacctcacgtgatccgcttgcctcggcctcccaaattgttaggattacaggcgtgagccactgggcccgacctaggctctgaattttagacaacaaaaaatagtttctcacaaactttttaacttactctcacctaaaggctggaaaaccccagtgaaggcttttaaaactcatcagacatagaaaaaaagaagcagctttaattgtaggatctcactgacacaaacataaggaaattctgagttatagatacctcacattaagctttttccactgacattgtaacttctgtcaacattcaaagaaaattcaaccctggtcaaaggtgacagttgacaatcctggaagctaacatcctctgtttatttgaacaagtttatactctgcacagggaattgaagttcttcttgtctgtgacttgatctcccaaagttaaagcactacgctttagggttgtgaattctgtttccaagacttaacttcacaatccactcccaaggaaaagtgctgagagaaagtaagcatcataaatgaaaaaaaaaaaaaaatctgagactattttctaatggcctttgcagagctctagacatacaatagttcagttgccttaaaaattcgcccaaataggctgggcatggtggcttatgcctgtaatcccagcacttcggaaggccaaggcaggaggatcacctgaggtcaggagttcgagaccagcctggccaacatgtcaaaaccccgtctctactaaaaatacaaaaattagctgggcatggtggcacatgcctgtagtcctagctactccggaggctgggcaggagaatctcttgaacccaggagacggaggttgcagtgagccaagatcgcgccactgcattccagcctgggtgacagagcgaggctctgtctcaagaaataataataataaattagcccaaataagtaaaattcttaaatctgtctcagaaatcatgactaatgctctaaaaagctttaatgcaacaagaataggacagaaatccccgcaaaataaagttgtaaataaaatgagtgggattgttgagttctcagtacagacgtgcatgtcaacacaaacccactacattggcacaaatgatccctttgtttgtaaacagaggccaaggagacagcttatagctcttcttctatgatgtacacggtaatgctaggggaagaagaatgaaagacaacttataataaaaattaagactttctcttctttaatataatttccaccagaagtatatactttaattggaaaaatatttatcaccatcttcatcaacatttaaaaaaatcctaaacatataaaaatattttctattcaaaaaccaacgagactccatttgggaacacaaagaaatacaagcctcaaagaaacaaaatgtcttataacaaagtggcagtggccagctcgcttttgctgtacactagttagggatgcagtctctggaatcagccccgccaagaacagtaatgtgaccttggacaaattacttaacttctctgtggccatttcttcatcttccatctgggaataatacccactcctctgagaatcacgagttaacacaaggccagagctgaaaacaatgtctgcccagcacactgtcagtgaacggtaagcattaggtaatgtttttattatcttcacacttgaaggcgttggaacattttctcaaactctgggttttgaacataatttgaaggacttgttaattgtctgctcacctctcgaaaggtggcatcataatgattagatacataatcagaatatcttcccaggtgagccatggtaagcagagctctagcccagaatgatgaatagttatttttaatacaaatcatggatgtggctgttactggcaacttcggcctgatttcccatatgcaaagaaatcccctaccaggggaaaacaagcaatgttagaaacccgttgggtttgtcctgttatcattacagggtaaagccaaattcacatttagtagcctgatgggcattaaaaatattagtcaccaaattaatcccaacaaataacaataattgattggctcattgatgtatttccccttgtcttccccaacctttctctaactagtcagaaaggaaagttttcatattttctgagaatctcattactgctctcaaaccatgctctatatcttagtataatttaaaaaatgagtcagcacaagcacctcagaaaactagcatagaatatgaagctacttctcttcatattagaaaagtacaaaaatttttaaaaggttattcagggtaccaaaggtaatagaaggatacatgaagagtgaatgttgcagtagattttgcaagctagcttccaaaagtaggtagaaaaagataaatgttcttcatcaatcaatcaatacaggtattcatcatctcagtggtgtcatccatgtgaaaatggacatagttattaagaataaacctaaagaagaaaccatcttgtatgtgacaaattataacttctcctttcttgaatattggggcagcaggggaataggaagtcaagatactccaagtattaacttcatttgcaaattgaattgtacataattgtgcaccatgctaatgcaatactgcttttagtaatgggatccaaatgaaaatttagaagaggtaaactccccctaaactgcaaacacatctgaatgtcaattcaattaggagtctatttagttattacacttcttagcataaagcgagttaaaggccaggaaaagaacacttgctttaatcactgaaacaatctacacatatttctcaaggctccacttaactcatcctgcaacatttatattaaaagtgacctatcacttaagtgatccaggagagtaaaggaagagttttaaggctgaaggtgattcctcctgagctctaataccataccctgaatttcaccttgttcttaactcttttccatgacactgtgtatggcttttaagcgagtccagaaaaacggctatcattactacttaatataaaccatggggttctgtatcatgtaaacccagagcaactcctctttgaagcaccgacattcaaggctctacataacatgtttcaactctatcttagtgctatacattttccaagtacctgcgaggaaacagatagcagcacctccatttttctgtaaattgtgcttttgttgctgttctaagactccttccaaggctgttaaactttgaagagagttgggaaaagacaagaacatcttgccttcccgattgggtattcaggcttcactcagtaaagctgtcatgaagtagcgcaaagggtcagagacaaaccacatggcatctgatgtttgtctgtataagtttaaaataaaaatgtgacactacaagaaggttaacatgtggacctaattttgaaaatacaaacaggaagcacccccaccccaatattaccatttaaaaaaaaaggaaaccaaacctcaaagataccttccaaggaagtgatgggtgtgacccaaactaacaaaagtaataaaacgtcacttcaactctgaaaccatcaaaagtgagggtctcattcaaccaactaaaaatctaacacctgtaaattgctcttctcttttgattagtaaaaacagcatagatttagatgtgcaaaatcttctccaaactgacataggcttttcagtagcagaggatcatcattaataaaacacccaatgtcaagattttacttcaaataaggccactataattaacagtgaatacaattttaaaaagtatttatcactctgatgcttagaacttaaatttaagtacaaaaactgtctgatcaatggaaactagattgttaagtttgactttcttattcccagaaataagcataaaactgttgtgtttccaacactgcaggagaaaaaaaaaaacttctgattttagaagagttctattcacaaagctcagaattaaaaacattttcttcctttaaataccacacatttgaggacagcgatagtgcagagctaactttgaagcattatttttattaagttgcacagttaaagtattttgatactttgatattttatagtatcaaaataaaaggatattcttctcaagagtccagtaacctggaattgccagatagctttttaaacgaataagtttcaaattatcagaaaaatcatacaaactagggttattttgcttccttttgtaggaataatgcagtaatctgcactcttaacagaaagggaaaaaatgtgtcacagatagaatgtccagaaatctgtgaataactttatgagatacagacatttttgtagggcacgaaaatagttaggcttccttcgattccacctgtaacctgcatctaatcttgagcatgttatttacctatctataacgtcttccttttacaataagactacctgtgtcacctacctacataacaacaagccaaataaaccacaacaaatggattcataatatataagcctaacaaaaattacagacaatttgaatactaacaatactatgatttgaaaaaactcgacttaagtatcaaaaagtaataaatggcaactttagtcttgatgtggcttttacatatgtaaatgacataaaaacaatcaagagaggaagaaaatggagatgagatgaaaagtcagagcaggataggaagtgttgaccaaaatatttatgttgtaacactccaaacgatgatagcacatttttctcctacaatcatacatactatgaagtacacaccttaaatttctgaacacaatccatattaatatcccgtgggcaaaaaatacaagcaccgaaaaggtgagaactgatgagaaggtgggatagtttacctagttgggtatatagcaaagattattttgtgcagagtttagcttcaagttatgcaataaccaaactactggtgatagaaatcaactttttttttctgatggtttgctttacaaaaaaaaaaaaaaaaaaaaaaaaaacctctccattccttccctgtgtctcaatctggagcttgaaatttcatcttccagaggctacagtagcaaacaagtcatctcctagataacgcgcttacctgacccaaggtgtggacttgtttgaattaaacgtaacagataccacaaattgtcacataggaagtttttcttaaaatcagcagccccttctcttatttagccatgtccattctaacaactgtgatcttccatgagatggaaactggtacccaaatgaataaacaaaacaacccaaagccttaaaataaaatcaatcaataagattctccccatttgaagtgatcagaaccactccaatatttacagtgttacaaaatgaaattttaaaacatgaaaggcacactcaataaaatacatcctcacctaggaactcacaggcaatgaacataacgcaatataacataagcaaatggacaacaatagaatgttggggagagaggcacagttctattaccttaattgaaagataacaaaattatttgaaataatgtagacccaacagctgaaagcttattatggcccaggcggctatccaacagctttggaaacctaagatccaagcagaccataaacaccacttgaagactgaaaaaaatgacataagcccaagtatgatattcagtgtcacgctggccctttcaaagggcattccctgaggacactgcagagaaaatgtatggaattgtatctaggcaaagatctgtatactgcacgatgctttgggaagagcacgaatctcagagtccttgaagtttcaatccctggatactcaacaaacagccgtgtcacctgagcaggccacttactccacctatctgggcctcagtttcctcatttgtacaataaaagaatggcatcatcgctgggttcctttccagctctaacattctttgacccacttttggcactatttatttgatacgaggtatggcgggatcacagggaccaagaagaaaagaactgactctggctctttggcaaagagagaatcggtatctcttttagtctttaaaattcttgtgcttttcattaatcccgtctttctaaaagctgacacttggttttcttctttggcttttccatcactgctggctacaagtgtttgcaaccgcctcttgctccgtgtgagttctttcctctttgttcaccccgaccatcttgccagattcctttagcctcagaccagcttttgtgatacaactccccttccgactctccatatctaccccccgacaccaggagcacttttaaccctttatccctgactagaaagaaaaagcacactgcatcccacggccacacgcacgagcccaggcctggcgggtcctgatgtgggatcccgccccccagagtcttatcgaaacgttcgtatttgttgtcttgattccttataaggccctgtttcttgaagctttgctaataccccccaccgcaccaggcacccccgcaggctcatcccatccccggagtcccgggaacctcttttgaaagaaagaagttaaagcaaggaagacggctggggatattcggaattgcaacgtgaaggtgtgaggcggctgacagcagccccctgagctcctatggggtcggcgcggggtccccacacacccactcagcacacgcgcacgcagcctttaaagcgcacgccccccgcggcgccgcggcgttcgcaagtccccctcgcgcaccccgcattgccctcagcctccccggcagccaacccggaccccctctccccgcgcgcgcccctcgcccagcgcgcaaccaccgcggcccgggagtgatggcggcggcgcggccctgacgggcggctgagcggctggagcgcgggccccgcccgggctggctccccggcctggctcccccggccccgggcccagggctcgccccgcagctcctacctcgctcggcccctcgggcgcccgcggctgctccggcccagctgtctggcttgcccgcccgcccgctcgctccctccctcggccgggccgccgcgcggagttgcctgcgctgggtccccgcccggggtgacggctccggccgccgactctcctcccgccggggcccgcgggggcgcgcgcgccgctcacgcgcggaggcccagggacgcgcgccgctggcaacccggagcgcgccccgcttcctggttccgcccggcgcgcgctcgctagcccgctgtccctcgcgccccctccgcgaccgcccttgaaggacccggaccccctcggcacacccgaggtggcggcgcgctcggcggtgccggtgccggcgccgcgcgcaccccctttctgcggcggtggggtgtcttcccggctcggctccctagccgacgccgcaccgcaagcacatgctgctttgtttgggttgggtcgaccaccactagcagggctagggcgcactgtcgtggtcgttttggttggccccctccgcggcccgcccacctctctccctgggagcccaggcccgcgttccgggtcctctcccgccgaggccgaggtcagaagtccacaggggccccgatcaataattatcctgggtttgcccccgggagggcgtctcagccagggctcctgccgcctgcatgggcacggcaggaattcacattcgcccaggccgaattcacctgtccgagttccagggtgaacctacgggggacggggcgcctggggccggttcccttcctgggaaaatctggctggctcccaccagtcagagctgcgggagggactgctctctctagagaagaaagaataaacagggtcatctgtaggatccaggggaagggggtcccccagatcctttccacgtgctgaggagggggttgcggttgtgggaagccaggctgagtcacccactctcctttcctctgctacgtctatctcccggagctggccagcggtttccctggcaaccctccaagggctagcactaaagcaagacataggaaagctccagaagccaagctgcaggggccaaaagagagagaaggacccctcccgcccccactcagacacacagagctcccctgtgtgtatgcaaaacgttcatgtccagagatggcccagagctgcaagttctcccatagtcctccctgggcagctctttccagcggccttctcttcacctccagaatgacaccagccacaaaggtctccagctggtcaaaaaacccttctccgctacccaggccactgctgcagtcccatactctgggccaacacctggcacagtgctttgcacagagtaggttcagggagcttggaggccagagaaggaagcaggaagcaggatggatgcgccaaccaaccccgagctctctggcaatctccctgacagttactgcccatgatgttttgacactcaggtgctccatgttctccatatttctcttttatcttttctttttcttttctttttttttttttttgagacggagtctctctctgttgcccaggctggagtgaaatggtgcggtctcagctcacggcaacctccacctcctgggttcaagtgattctccttcctcagcctcctgagtagctgggattacaggcgcacaccaccacatccggctaatttttgtatttttgtagtagagacggggtttcaccatgttggccaggctggtctcgaactcctgacctcgtaatctgcccgcctcagcctcccaaagtgctgggattacaggcatcagccaccgcacctgactcatgtttctctttcttgtgagctttcatccctgcacacatgctattccctctgcctggaatgtcctgccttcttgatgtctgcccttcggtgacatttgcttcaggcagcatgacctccctccttgtttcccaccgcgttattcatgcctctattacagcacttcttgtgttgaaggacaatttcatgttttcatgtttctgtctctgtccccaagggcagacgcaatatgctattcacttttaaatcctcctactcgtgttcaagcccagaacagacactcaataaatatttttggaacaaatgctatgctctaggaatgcaaatggaggttacaaggactatgcagtcattaagaggacagggtctagcccggtgtggcgacacacacctgtggtcccagctactgaggaggctaaggtgggaggatcacttgagcctgggaggtcaagggtgtgatgatttttttttatttttattttttggagacagtctcacagaaaaaggtctcatggtgtggtggcacaatcacagctcaaggcaacctcctgggctcaagcaatcctcctgcctcagccttatgagtaactgggaccacagacgtgcaccactactcccagattaattttttaaaattatttgtaggccgggcacggtggctcacgcctgtagtcccagcactttgggaagccaaggtcggtggatcacgaggtcaggtgttccagaccagcctggccaatatgttgaaaccctgtctctactaaaaatacaaaaattagctggacgtggtggtgcgcgcctgtagtcccagctactggggaggctgaggcaggagaattgcttgaacccgagaggcagaggttgcagtgagccgagatcacgaaactgcactccagcctggggcgacagagtgagactccatctcaaaaaaaaaaaaatatttgtaaagacagggtctcattatattgcctgggctgttcaagaacttatggctcaagcaaccctccctcctcagcctcccaaagtgctggaattacatttgtgagccactgtgcccagcctgaagctgtagtgagccatgattgtgccactgctctccagcctgggcgacagagtgagacctgtctcaaaaaaagaaaaaaaaaaaaaagtacaggttctcaaaccagactctgtcaattccttgagctgggtaatcttgagtgtgttttcctctatcttctcgtttgtaatgtggtgatagagacagtacctacctcatcgggttgcgggaaataagtgtttactacatgtaaagtgcttcactgtaaagcactgtatagcggttaactactactgtggtgtttagtagcagctaagatgaatactcctcttcccaagaccggcggtctaggactcaagccagctggtttgtggcagccacagggcgctagtttaaatgtcctgaagggggccgggcgcagtggctcacgcctgtaatcccagcactttaggaggccgaggcgggtggatcacccgagatcgggagttcgagaccagcctaaccaacgtggagaaacctcgtctttactaaaaatacaaaattagctgggcatggtggtgccattacaggattacatgcctgtaatcccagctacttgggaggctgaggcaggagaatcacttgaaactgggaggcggaggttgcggtgagccaaaatcacaccattgcactccagcctgggcagcaagagcaaaactccatctcagaaaaaaaaaaaaaaatgtcctgaagggtgggtgggaatgcctcttgattcttgcagctctaggcacatctctgactgatggtcaccaggcaccaagctagacctggctgggtgtgtgcacagatgctgaggacagaatgttctgggtcactacctcagcaaaacagaatgttgtcatcctgggatgggaaggcctgacacctgcttctctgcttgacagttctgatggggtgggaccctcttcttctaggcctcggggacatattcccttaaattgaggggacaccagacttaagacatgacagaaagaaagaaactgaacaggaagctaggatcctgaaagaccccacagtccaacccatcaggaatgacccaagaaggtacctggagatgcagcaatgtccactggagggtctcatcccttagtgcaccagcctgacccaggagagaggcttgggggaagagcctgggggtctagtccacagcccttgtccatgcatgcccctgctcccatcctacagcctcctcccctctctctctcatagatgaacacatggctttcagagggggcagcttccctgcttcacatcctccctcactcctgccccagagatcatgaggccattttctgggaacgtcactgaagccacaaccatgatcccctctggccagaaaccagaggccttcgttattatggcttccctcctgcatcccaggagtcaggctgaccctgggcaaccaccggccacacatttgctaagaaagggcactgtgggaatgtccctttttccctgtggggatgaatccttccatagggggataggtcagtacaggaccctggagccatgtggagaaggtataggatgctcaacagaaaagaaggcggggatgccagatctccaaggcctcagaatggcgtggcctcggtttggaatgggctctgcagtttcggagggctctgtcagtgcccctgcttacttctgccagagcattggtggtgaaaagttagatatggttctaaatcccagctctgctaacttactagctgttggccgggcgcggtggctcacacctgtaatcccagcactttgggaggccgaggcgggtgggtcaggaggtcaggcgatcgagaccatcctggctaacacggtgaaaccctgactctactaaaaataccaaaaattagccgggcgtggtggcgggcgcctgtagtcccagctactccggaggctgagccaggagaatggcgtgaacccgggaggctgaggttgcagtgagcagagatcgcgccactgcactccagcctgggcgacagagcgagattccgtctcaaaaaaaaaaaacaaaaacaaaaacaaaaaaaaactagctgtgtgactttggtctaggtacttaatgtctctgaggatctcagtttcccatcacgtgtaaatcatagttagggggtagagtgtaatatatgtttcaaatccacagaatccttccgtgcatttaaatgcacaaaagaccccagcaactgttgttgcccctccagaagggccctgggggacaggaaagggcagagactaacttttcaccacatacccttttgaatcttttgttacaaaatacatatatcatgtgcagatgctccctattaaaacattagtaaaatagacagtttttttaaaggaaaaaggagagcatttgtgaaggcaactaagcactgtgcctggcacttgataaaaaagcattttctctctttctttccctcagcctaatcccagccagtgtgctggccaggagagagctggtgctttgtcacatggaggggaggggagaggacgggagcgatggatgtgcaggtgcatggaggactcgccacctggagagtctcacacacctgctctcagtcttgctcctgtgtgcctcaccaatctgggctcccttccagccagagctaaaggctaaagggtgggctctctggaaaggccaaggatcccccgaccccgcctcttgggacagggtcactgggctctctccacccagagtcctgggggatgcagcattatccagggagggtggggcggacgcagaggagggagcagagtgccactgcagccagtatcttgctggcttgccaggcaggttaagaactcaaaattcagcccagcaccaggcaaagatgaggctgctgctgccactgtgtgtagaaaagcagctcagtgggaccagagcaggcagaggccagggcagcagggggagagtcttctgggaaccatggtgggggtggtcagtgaacagggggctgccctgaaccgtcaaagctccggaagttctgtgctggtttaggggccttcattaatccaacagatatttatgaagactctattgtggacaagcagtgggacatagccctttaggcaatgtgttagggccataagaaggggcctgtaatacagatgggattgaagggcagaggaaaaaacacccagctctactggccaaggcctctgagcacctacaatgcaccagccactgtgactgagtcttttttttttagacagagtctcgctctgtcacccaggctggagtgcagtggtgtgatctcatctcactgccacctctgcctcccaggttcaagtgattctcctgcctcagcctcccaaatagctgggattacaggcatctgccaccacacctggctaatttttttatttttaatagagacaaggtttcaccatgctgagtctgtgctggcttggtcaggctggcctcaaactcctgacctcaggtgatccacctgcctcagcctcccaaagtgctaggattacaggcttgagccaccgcaccgggcctgtgactgggtcttaacagaaatcccagcagtgggtcttgctatttctttacaagtgaggatgcttagatccaagaggcagactcactcactcaagatcctacagcagagccagggtctgcaccaggaccttatgactccaaagcctttgtgttttcctctaggccacactaaccctaggaaagatgaggccaatttcaccaggtggccaagggaggaatgacattccaggtagatggaatgaaaggggctagtgcttggagttgagaggccagcgtaaggggaaaagcctggccgaagcacttttttgaggcttggagcaaggaagatgtgggtagatctgagacttaagaaacgaagaaacaatgagaaacagattctacagaaaggaaccccctccagtcataacaaaggaaagtggcagagtactgggaggtgtcgtggaagatgctcagccccctcgcacacaacccccagagggcttgaggttgggtactgggctggccaaggcacaaaagatttcttgttgggctggaaggaggagaaactagctcagcgggaagagcggcctgatagtcatcatggatgaggatgagaagccaggcttgacccagggctgcccaggacagtgccaattccactcagctgcctggctctgtgtgccctctctcctctctccaggctcctgggcctggccctgcaatgagggggctgcaaagggtgggctcctcctgcccacctgactggctgggaaatgtgaacctggcacagactctgcatcctcttctcttcgtccagaaagaaaccggcctacaagcctctcccccagggcaggcaggctgggcagctgggcagaggaagcaggactcctctcctacccaccctgtccagccccacacccttcccctcatgctattcccagaaacagaggacagtcactatgcctcaggcaggatggccttgtgttctcttggtgacttcactgtaaagtgacttccctgaagagtggtggataggggacagcggcaggaacgggcttcacccaagctccggcagctccttcccttcccccagatttgcacagaagtcctcaccctgtgcatataaacacacaccctccctaggtcctgatctgtcttcttggacaagaatgggggtggcatttctatagggaggtaccagggcctggcctcagaggtggggtatactctgagcatgggcccatggccccacttctagaagccttctccggtgggggctggagtgcaggtaggctgtccaagcagaggcaaggtgggggtgaaacaggatgtttaagtgctccagggcttctcccctttgccgcagggtgaaaagatacttcctagaaagcctccagctttcttgggaaggcccttcacccctaccccacctcccctctggctcccatgtaacaggaactctccttgaagaagggacttggagcacaggaaacaaaggcatctctgtaccacctccctccaccccccaaggaaggtcaagtcaaggtgacctcaatctgttctccccagggtaggggcatgggcagacctgatcgtcaagggcaaggcagaaaggggacctgggataattctttctctctccctctttttttttttttctttttgtgacggagtttcgcttttgttgcccaggctggagtgcaacggcgtgatctcagctaactgcaacctccacctccctggttcaagtgattatcctgcctcagcgtactgagtagctgggactacaggtgtgcaccaccacgcccagctaatttttggatttttagtagagacggggtttcaccatattggccaggctgatctcgaactcctgacctcaggtgatgcacccgcctcagcctcccaaagtgctgggactacaggcgtgagccaccatgcccggccctttgggataattctcttaatccataaactcaaacccaccttcatgtaagtgtgcacagagcacactgtcccattcaatagagcaggggtgtaggctgggcgagaatggagatgccatgctccgcaccgcagaaaaatggtgggctagcccagcccagggaggcctcttcactccgccggtgtgtgctgggcttggggaagcttagaaaggttatactgagaccctgcccacaaggcccggcaacttggatcctggtgccatctgtgcacttactggccagacagctttgggcaggtttctttcatggactaatcaaagggtgtgattctggccctgactgccttcaaggttattgaaaggatccgttgagttgaagagcacaaccatgtctgtacacaaatgtgccttgatgtagttcaggatacgaatatagtgtgccaactgaagcctaggctgcagactattattattcctaataaaatataggaggtcttcttttggagaatatattgcttttttttttttcttttctttttttttgagacagagtctgactctgttgcccaggctggagtgcagtggtatgatctcggctcactgcaacctccgcctcctgtgttcaagagattcttgtgcctcagcctcccgagtagctgggattacaggtgcgtgacaccacgcccagctaattgttttgtatttttagtagacacgaggtttcaccatgttggtcagactggtctcaaactcctggcctcaagtgatcctcccacctcagcctcccagagtgctgggattacaggcgtgagccactgcacctagcctggggaatatatttctgtaagatttctaaaatccttcctcactccccatctaatactgtgacttggatttgggggtgaagagcagttaggggcaaggaggccagcctcggaccgcagctcagtcagacccttgacagtttctgatcttcctgaacccccatcccgtggcctcagttttctcctccacagcctggttccccaaaatcaccagggcactttgtggtgggaaatcacccacacaaggggacaaacaaggggactgaaagcaaaaagaaaccccaaatttgacatttctgggtagttgtgttatctggagccacgactacagtcacctcttcccaacccaactctgacacccttccctctactcccttgggtgccctttgcccatcctgggaaagttccatagctcctcctcctccccactgcatctcaaagggagaacaggcctgaagaaatggagagaaacccagacagaatcagagaaccagatggagacctaaggagacaagggagagacacagagagaataaaagccagagtgggggccgggcatggtagctgatgcctgtaattccagcactttgggaggccgaggcgggtggatcacctgaggtcgggagttcgagaccagcctgaccaacatggagaaacaccgcctctactaaaaatacaaaattagaaatacaaaattagccaggagtggtggcacatgcctgtaatcccagctactcgggaggctgaggtaggagaatcgcttgaaccttggaggtggaggttgctgtgagccaagatcgcgccattgcactccagtctgggcaacgagagcgaaactccatctcaaaaaaaaaaaaaaaaaaaaaacccagaaggggaaatgtgcaatgaaagacacagatattcggggccttacagtcagagaccaaatgagggatggtcaaccaagggcacagccactgggcacagggtcagggtgggaggcacgggagggctctgaaaacacagccacacacccttttaggcccatccttcccattctgtactctggcacctcaatgctagctttttaggacctaggactacccacactaaagccaagcccggcccaaccaagacagatgtttggtgggtggggctgcctgctggagcaacaggcctctgcaggccctggaggagaagtctagagaggtggctgcctggaagagagcaggcaggaccccctctcttaagcaggcacccccaccccatcaggtgcccagatgtcagtgcatggcaagggtggccctctgccctccagacctgggtgagaggacttgaaaacctgaggaatctgctcccatcaactgacttccacacctgcctgaagggaactgctggagggcacaggtgccaagtgggacccacccaaatgtggcaatgggtttgtatccagccaccgacaggctgcatgacggtggcaaagtcacttcccctctctggcctttgtttttccacttgtaaaatcatctttatggtcacttccagctgtggcacttggctttcattccagttgaccccctagctctgtgtctgaccctcccctgccaaatccattgctcagagtgggaaaggagaggagagggactatacttcctcctccctggggccccctgcagagcatctgggaagcaaggcttccctacatcctccatgcacccccttagagttttcaattcctttcctcgtgatcctgccaactaagacactgtgaccacacagagaaggtggggagaacgcagacattttggcttctgcagctttgaagttctttttttttttttcctctgaagttaaaagaatgaaactgggagaggtagtaaggggcaagaaaggagagtggaaatggagagaaaagggcagctctgagaagcagctggggagggaggcagatgagaatgcaccccccccaacagaacatgcagtcttggcccagctgtgctgtgagtgggcagctgggctggcccctcctctggtgctgccaacccgctgccaggcagaggggaggcccagaggagagggaagctgggcaaaggggatggaaggcgtccagcccgaccttaccaaaccccttgggcctcgtgggaaggggcctcttggagagggggactgaggctctagacaggatattcactgctgtggcaaggcctgtagagagtttcgaagttaggaggactcaagacggtccctccctggacttttctgaaggtagaaccagcctcataagtaactaggctgggtgaacgggggcgctggctagtttatggatcacagtcggctggtgaggccacgtgcctactgtgtggccctgggtggccccgggcaagcccctttccctctcaggacttccatttcttacctgcaaaattgtggagagggggagggctgaaacacatgactgccaagattctttccagttcctccgtcagggttgagtttagatggccggagtaaaagaaggagggaggtgctgcggtggtgggggtgatcttggcttcactagaatccccagttcttcccctctctacagttttgtctctgaggtcacaaaacctgtggcccccaagacacacatgcgcacacacgcgcgtgcacacacacaccccacacatttattttttaatctaggggctcaaaagatgacacgcgccagagctggaaggcgtcgccaattggtccacttttccctcctccctttttgcggatgagaaaactgaggcccaggtttgggatttccagagcccgggatttcccggcaacgcccgacaaccacattcccccggctattctgacccgccccggttccgggacgctccctgggagccgccgccgagggcctgctgggactcccgggggaccccgccgtcggggcagcccccacgcccggcgccgcccgccgggaacggccgccgctgttgcgcacttgcaggggagccggcgactgagggcgaggcagggagggagcaagcggggctgggagggctgctggcgcgggctcgcgcgctgtgtatggtctatcgcaggcagctgacctttgaggaggaaatcgctgctctccgctccttcctgtagtaacagccgccgctgccgccgccgccaggaaccccggccgggagcgagagccgcggggcgcagagccggcccggctgccggacggtgcggccccaccaggtgggtgacccggtggcgcgtcctcggcggcgcgccgagaggggacactctactgccgccccggcacctccggcacccggagctcgacggccgggcgcagcgcggggatcagtccccggcactgcgagggagttggcccagcgcagacgagggacggggggacgtggggacaggggtcggggatgaaaggcagaggccagggagggcgccgtcctggcacgcctcggagagggagcacctgtcgggctggacccggggaggcactagtgcacagatgggggagcagccgaagaggggagcgcccaagtcctcagccctgtctcctgaacagccccagccacgtgcccgaaaagccctagccgtcgagtgggagccgtcgtggcgctggcctaacttcgggttggaatatctccccttcccagaaaccgggcccgaggtgggctgggggatccttgcagccctctccagggggcctgtgggcctcccgccgtcaagtttctctttcagtttctggccgtccccctcactagggaagctccggtggggcgaggggagaggaagacggggagggcacctgcctctgcagagcaccttcccctccccttcagcgggttccttgttggaggggatgggcggccctccactcctcaccatctctgttcccgcacaggaaagctatctgtgggaggggaggggcctggcctggccgcggtccagggataggtaggcatggcaaggccaggggcaggcccggttccttggcctctgcagaggagagcgcttcagcgctcggctcgccctaggtgaacggccatggcgggctggatccaggcccagcagctgcagggagacgcgctgcgccagatgcaggtgctgtacggccagcacttccccatcgaggtccggcactacttggcccagtggattgagagccagccatggtaggcacgtcccgccctgcccctcctcagagggtccctaccatccaggccctttggcctctagttttactcatggtggtttggtgtgactctggtcctgcctgtccttctttgtgcggaaggggtggtgcccctgggaaaggggaagcctgggaggacagagaatgtttttagactcggatgtctgtggagctgctgggaacaagtcttgtgggccctggagtgccctcggtcatgagcctggggtttccactttattccagctccctgacctccttgcccaaggaggtgccacagtaggtttttctcttctgccctgccccaagggatgccattgacttggacaatccccaggacagagcccaagccacccagctcctggagggcctggtgcaggagctgcagaagaaggcggagcaccaggtgggggaagatgggtttttactgaagatcaagctggggcactacgccacgcagctccaggtgggtgtaggctctgggccacctacggggaggaagcatcatcttgttccagcatcagaacccctgggttttttcctggcctggccactgactcaccatgtgaccacgaacttattgggaacttttcttcgatttcccccaccccctctttctaaattcgacctgtcggatttctttagcatattgcaaagcaagggtgggaggtgtttgttgccaacagagagagatgggtgaactggccttatggaagcagcagaagggatggagggagactgagtcaggattcctatgttggagaagggaagaccagcagactctagaaatgaggccaccagacctccctcttggggtcttttaaaggtgagagaggagccatcccagagacaagagctggacacaagggctttgaattgagggtttagaaataagatgtagcttctttacttgaggggagtgggtatggaggaagagagggagtttttgtggaagcaggaaaggggtgtgggtagtgatgacagtcaagcacttattggaactcacgtatgtttcctagagagcccttcaatacagacagcagggtgccagggaaatacaagtccatcccagaagagggggaaaacaggagaagcctgaggggaagcaatataggaggccaggggcaggatggtgggaagtaccttgaccttggcatcagatgccctgagtctggagtcatctgctctctcacttggttgcgtctggacgagtacataatgtctgagcatcagttttctcatctgtgaaatggggatcatagtttctgcttatgtcctagagtttccatgctgttagtgccttgatcccccaccactttttggcaccagggaccggtttcatggaagacaatttttccatggaccgggattgggcagggaggtggtttctggatgattcaagagcatcacgtttattgtgcactttatttctattgttattacattgtgctatgcaatgaaataattatagaactcaccacaatgtaggatcagtgggagccctgagcttgttttcctgcaactagacagtcccatctgggggtgatgggagacagtgacagatcaccaggcattagattctcttaagaagtgcataacctagatccctcgcatgtgcagttcacaatagggttagcattcctatgggaatccagtgccattgctgatctgacaggaagcagagttcaggctgtaatgcgagcaataggcagcagctgtaaatacagatgaagcgtcactcacttgctcaccgccgctcacctcctgctgtgtggtccagttcctaacagaccaccgacctgtaccagtccatggcccaggggtttgggacccctgtgttacagtcaaaagatacggtagattggaagtgcttcataagactgggtatgatggctcacacctgtaatcacagcactttgggaggccgaggcgggtggatcacctgaggtcgggagttcgagaccagcctgaccaacgtggagaaaccccgcctctactaaaaatacaaaattagccgagcgtgatggcacatgcctgtaatcccaactactcaggaggctgaggaaggagaatcgcttgaacccgggaggtggaggttgcagtgagctgagatcacaccattgcacctttagcctaggcaacaagagcaaaactccatctcaaaaagaaaaaaaaaaaaaagagaaagtgcctcataaactgtgggtttttaattcgctccaaaccagatatgaagatcttggaggggaagatgaggatgaggaacagagatatagaggtgtctggggatagttcctgaggctccctgggaaaagctgaggcagaggctgaaggagaggaagggctgggcatagcatggggctggcatggctggagcagaggatggcgctggaggctactgttggattctttcagaaaacatatgaccgctgccccctggagctggtccgctgcatccggcacattctgtacaatgaacagaggctggtccgagaagccaacaatgtgagtgtcccttggggatggggaggagtgttgagaagtccctccatatgcctttctctccagaaacaactgtgtttatataaaacagcagcacgaggagagcaccaagaagatgagggacgtgggcaagtgtaagaggtggcagcattgcacgccggggtggagtgaccccctggatccagtccctggctctaccacttactagctgtgtgacttgagcaagttgcttaatctctctgagcctctgttcctgtttttttttcttttttcttttttcttttttttgagacggattcttgctctgtcacccaggctgcagtgcagtggcgtgatctcggctcactgcaagctctgccttccaggttcacaccattctcctgcctcagcctcccgagtagctggggctacaggcgcccaccaccatgcccggttaattttttgtatttttagcagagatggggtttcactgtgttagccaggatggtctcaacctgacctcgtgatccgcccacctcggcctcccaaagtactggggttacaggcgtgagccaccacgcttggcgcctactgttttttcccccccgagatgcagtcttgctctgttgcccaggctggagtgcagtgatgtgatctctgctcactgcaacctctgcctcccaggttcaagcaattctcttgcctcagcctcccgagtagctgggattacaggtgcccaccaccatgcccggctaattttttttgtatttttagtagagacgtggtttcactatgttggccaggctggtcttgaactcctgacctcatgatccacccgcctcggcctcccaaagtgttgggattacaggcgtgagccaccgtgcccggcctgttcctactcttgtaaaatggagatagcaatcatacctatctgtgtcagaagaactaacacaggcaggctcagagaagtgaggcccagggaggggtaacagggacacatctccccagttctgaaataataaaggcactgggcatctacatggacaatggcacagtgctgtactatctgcaatagagcaaaatgaatttcacaacatgacgtgacagaaatcttagaacagtgaccggagcacaggtcatatttattatttctttctttatttgtttgtttgtttatttatttttgagactgagtctcactctatcatctaggctggagtgcagtggcgtgatctcggctcactgcaacctccaccccttgggttcaagagattctcatgcctcagcctcccaagtagctaggattacaggggcccaccaccatgcccggctaatttttgtatttttagtagagacagggtttcaccctgttggccaggctggtctcgaattcctgacttcaagtgatccacctgcctcggcctcccgaagtgctgggattacaggcatgagccaccacgcccggcctattacgtatttattgttgtggacatggatttcaggatttactcagtagacatttattgaggtcttactgtgtgtccgatgctgggctatcatcagagaaacacataaaggcctggttcttgcctggaaggaattctggcagtgatggattctctagagatgagctgagtgctaagggggcctaggtggaaaaagcacccaactcagattggggcaggctggcaggggagcgtcctgtggacaggcatgtctgagctacagtggagaaaggcaggagaggagggatgaattttctaatgaaaagacagcagctgcgagagcaggagggcatgaatcttcttatcacattggaagacttgtaagtggtcagtgtaactggggagaaggaaccaagtggggagttgccatggataaaaatagatagagagggccaggcgtggtggctcacatctgtaatcccagcactttgggaggccaaggtgggcggatcacctgacgtcagaagttcgagaccagcctggccaacatggtgaaacccagtctctactaaaaaatacaaaaattagctaggcgtggtggcgggcgcctgtaatcctagctactcgggcggctgaggcaggagaattgcttgaacccaggagggggatgttgcagtgagctgagattgcaccacttcactccagcctgggcaacagagcgagactctgtataaaaaaaaaaaaaataggggttagaaaccaggtcacaaagggtcttccagcacagcccctgtgtccctgacttgttgccatcacagagctatctgcaaacctaaaaatgacttcagcctcattgacaaatccatgtccatggtgctggtgctgtcatggtctgggagctcattccttcctccaaccatacaactgttcctgaacacccctggcattctagggcttggggattctgtagttcacaggaaaggcaaggtcctagcccttgggaacctcacatccttgtgcagggagacagacagaaacatgtaagcaaatacaagaacaacacacttttagataggactactgtgaattggctcgtcagagatgacccctctgcaatggtaccagttaaagtgctttgcctcaggaggatctgatgccagaatgttccagactgttggaacaataagtgcaagggccccagggcaggaacatgcctgtgtgttcaaggaacagaaacagaaagcacacattcccagcgagctggggttggaggtaggcagggctatggccagcagacaccatgggaaggggtttggattttattctgagaacagttcattggaaagcctctgaggacttgttcctcttcatccatgtgctccctccctttgtgacctggtttctacccctctctctctattttttttttttttgaaacggagtctcgctgtgttgccaaggctagagtgcagtggcgcaatctcggctcactgcaacatccccctcctgggttcaagcgattctcctgaatgtgctgaaggaatggctggatccaaggggagcttgttgatgcctcccctctaacttcatttcggggtctccaggatgcctgtgagagtttcggcctcttccctcttccttcagtcacaagggggtcttaagtgagatggtgtgtgttcacacagccctgttcctccctatgtccctaggatctactgcagtccatggtattgagtcagcaaataaatgtagagcgaggggtcatcatcattagtgggaaaacccaggtgacacctgggacgtgttgagttctagtccctgggaggaaattagatggaccctgtttggaatactctagtggagggcagctctgacatagatatttggactttgaaggtgttactatctgccgttatctgccaggtcacctgtttctcctttctctttcccttttctatcccaattctggcaaatgactccttctgatgcaaatgatccttccttcttgccctagtttcccttcttaccctagtttggggtttggggtttggggtctgtagtattggtgtttcctaatgcctgtggtcttctcccatcctctcttccccgagttatttccattccatctgtctccagtgcagctctccggctgggatcctggttgacgccatgtcccagaagcaccttcagatcaaccagacatttgaggagctgcgactggtcacgcaggacacagagaatgagctgaagaaactgcagcagactcaggagtacttcatcatccagtaccaggagagcctgaggatccaaggtgaggcgcggtggaggcagtgtgcatccggagggtgggagtgaggaacattctatggactcctagagggtagagctgggtcagtgtccatctcctcagcactttgcccaaagcctggtagaagcaatggctcccggtgattgagcccctgccgtgggtcacacttggcacacattatttaattcaaccctctcaacaagcctatgaagtgaacagttgtgttatccccccttttgcagatggtaaaagtgaggttcaaagagaacaagtaacttggcctaggttgcctgtaaattacagaactggatctcaactagagatatatcataaaactcctgtactttattaaccagtattctctccttaatggtatgtattctgtaaatatcgacacaaataggtaaatatgaacagtgctccctaaccagagggaggacttggattggaagtcttctggttgaaccaggctgggagaggtggaacttccaaagtgggccttcttgagcctcacggataggatgtgggcctgggggaaggggtgacagtagaaaattctcctgtatcctaggtctgtagttcgccaatggctcccatgataaagatgtggggaaattaaaaaatcaaattagcttgaaaggaactatccccaggtacaatttgaggagtcatgggacatggcccatctattaatatgtcccattccagactgaccccagaaatgtaacacctcatcttagtgagaacaaggggtgtcaaactgctttttcctttactctttttaatctgatttcttaaggtagaccttaggtcattgattttagacctttcttcttttcttttctttctttttcttttcttttttttgagacaatcttgctctgtcgcccaggctggagcacagtggcatgatttcggctcactgcagcctctgcttcccagcttcaagaaattcttgtgcctcagtctcccgcatagctgggactacaggtgcaggccaccacgcccagctgatttttttagaattctattgtagctatttaagctctcttcctaaccctgcactgtcagtgctttgtgtacactgagaccagcacaatgcctgaatattgcagctattatgtaaatacttgcaggataattctaaatgtttgtttgtttgtttgtttatttattattgcccaggctggagtgcagtggcacgatctcatctcactgcgacctctgcctctcaggttcaaactattctcatgcctcagcctcctcagtagctgggactacagacatgcaccaccatgcctggctaattttttttttttgtagttttagtagatacagggttgtgccgtgttgtccaggctggttgcaacctctagcctcgagtgatctgcctgcctcggcctcccaaagtgctaggattataggcgtgagccacggtgcccagccaatactgacaggataattctaagagaatttcccctcatctgaatctatcccagactggccctagaagaagggcagctccttctgagaatggaaacggaagattttgggcggttattcctacccaagtccttagactgtcgacagtatttctgatcccgtgcctggcttttctgtttcctgtgcatggtggcggattaggtttggattcaggttgggtttggatctatcatgcagtgtcttctcagtcccatttgtcaagttcactcagcagaaacacagactattgatctgcttttgccagggaaggctcagctgcctccagtggagtagggaaattgcttcccgtctccctggcctccttcctaaaagcttctgcaaatttccaggagagccctaagtgggtcccttgcataggaaggctgggcccaggtgttgggatcaccaccaccctccctgtggctgggcaggatacccgaggtagccgtgcagacacctcggatctgtccgtgcctggatgatcctcttcctgctcgatacctgcagtgagattggagccatatttctgagttctagctctgggctgttcctggctacatagagttgcttttgtctgtcccagcttgtgcatcccatgggtcagggctggggtcagagtgacgtggccctcaggggccagccaggagctcgaccaagacatgctggtgcgcgcatcttctgactcagctcaagcaaggacgctgggctgttgagaaggtgatgggaagggattaatagtcccagtgtggtggagacgggctgtcgctgggagggtggggtgggcctgcggtggtggttgtaactgtggacatgtttactttcttagcctgggttattgatacacaggcgcccttgtgttccacatcccctgtgtcttacgtatttcataatggatacttttttttttttgagatggagtcttgctctgttgccttggctggagtgcagtggtgctctcggctcactgcaacctttaaccccgggttcaagcaattctcctgcctcagcctcctaagtagctgggattacaggcatgcgccaccatgcccagctaatttttgtatttttagtagagacagggtcttgccatgttggccaggctggtctcgaactcttgacctcaagtgatctgcctgtctcagcctcccaaagtgctgggattacaggcgtaagccaccgagcctggcacatgatggatacttttttttttttttttttagacagagtctagctctgtcgcccaggctggagtgcagtggcccaatctcggctcactgcaagctccaccttctgggttcacgccattctcctgcctcagcctccctagtagctggaactacaggcacccgccaccatgcccggctaattttttgtgtttttagtagagatggggtttcactgtgttagccaggatggtctctagccaggatggtctcgatcacctgacctcgtgatctgcccgcctcagtctcccaaagtgctgggattacaggcgtgagccactgcgcccagccccatgatggatactttttaaaagctagtgaggcctgacttattccctgtcccgccatcaatgagactcctcacagatggtgtggagggaagccgcctcccttcggcctccctttcctgagagaatcttggtggctctgcatccccagtggccctggacacgctctccctctgcggtctgtctatctgtctgtctcccctggttggtcggctgggctcacagtgagcccacctggacaaacatgctgggccccttccagcccctcaagaatctcatcctcccctgaggagggactgctgtgctcagggacgagacagagccgccggggctggggttccctgaagaggccttgctgcgggagggatggggccgagcagctgcttgtctctgtcacctcttctctctgtcctgttccccgttaaccaagaagcacgaacctcacacagagctcacccatgtcaggcagctttctggcatcttccatgtcctcatgtatttaatcttcaagcaccccactgaggcaggtgctgagaatctcccgttttacacgtggggaagctgaggcacaggaaaggaaagcgatttgcccaggttcacctgcagtcaagggcatgggcacacttacaccccagacagcctggacccatgctgggacgcgagaagagggctggcagccctgtgaggcaggcgggcaggaggcaggcaggcctcctccccagctgccccagcacccgtgtgcccccagaggggacggctcagagtcaggaggctggtgagcagggcccagaggcgcctcctgaggcgccattcatcttggcccccctggctgtcaggaaccccgacttgctcttgatgcagtgtctgagcctgggagggtctcgctccagaacaggtgagtgggcttctctaggcctcctgttggacactaggaggtgatggtcatggtttcctcttctctcctctagctcagtttgcccagctggcccagctgagcccccaggagcgtctgagccgggagacggccctccagcagaagcaggtgtctctggaggcctggttgcagcgtgaggcacagacactgcagcagtaccgcgtggtgagtggggtcctgggcctctcctgggcgtgggtgccatgaagtcagtctctggggacccgagggagggctgggaccagcatgagagcagaacctgggagggcaggaggccttttttcctgggggccttgcgaggcagagcagcttggggagagggaacggcctgggccctgccctgccatttcccagcgaggccctgcggtgttctctgggagcccagaaggggctgctctcctcccttccctcaggagctggccgagaagcaccagaagaccctgcagctgctgcggaagcagcagaccatcatcctggatgacgagctgatccagtggaagcggcggcagcagctggccgggaacggcgggccccccgagggcagcctggacgtgctacagtcctggtaatggtgtggggcggccagcgggcagggcaggaggggctggtggggaccccggctgcttctgcgtcctgtgctggctcctgcagcaggccccctccatcctgggacagctcttgtttctccagggagcctggttcctcaatcagactttggtccccatcctgtgcacctcccccaggaagggggctgctgtcctgggggtgggatggggctcgggtgtgtggggtgatgcttgggctgtttgggcctagtcagggtcgcccctcctgtgtacgtctctaattctgggaggcagggagctctgctcttcccatgggtgggaagtgtggcgaaagcacagagccttcctgggggaacgggagctgtgtcttggggcctggcgtctgtgaggagaagccattgtcctcctgttggccttggggctctcgtgcaggtgtgagaagttggccgagatcatctggcagaaccggcagcagatccgcagggctgagcacctctgccagcagctgcccatccccggcccagtggaggagatgctggccgaggtcaacgccaccatcacggacattatctcagccctggtgaccaggtgactgctgcctgtttgccatgcccaggagcttggggcagctcctgcctgcgtggggggagctgcaggtgccttccagaccagcagatccacttcctgcctctcatccctcccaactccatctccagttgctgtggctgctaggtgccgcccttgcccagtttctcctgtggacactgcaagagataccctgggccgcagcccatgccagctgctgtgttatctcactcccctctccatcctctccctggactctcacagcttccccgggaacagaggttgtgcccgagctcatcacctcctgagccccatgggaggcagccccacccccaccacagagggactgagagccctttcccctgcgccaacccctcatcgtgtgtctgtccctgtgtcccatgcagcacattcatcattgagaagcagcctcctcaggtcctgaagacccagaccaagtttgcagccaccgtacgcctgctggtgggcgggaagctgaacgtgcacatgaatcccccccaggtgaaggccaccatcatcagtgagcagcaggccaagtctctgcttaaaaatgagaacacccgcaagtaattgtgcctctcccttcccctgcccaagcttaggtgtgggggacctgcaccccccgctttgtccttgcatccagctatgtcttgtcccctagttcaccgtgttgcccaggctggtctcgaactcctggactcatgcagtcttcccacctcagcctcccaaagtgctgagttgataggcgtgagccaccacacccagccgagtatccgttctttaccctggggatggtgtggctgccggagagctgaggctcactgccactgcccagcattgtgagagactatcacaccactttctcctgaaagtgtattgcttcacaccattgtaaattcaaacaatcatgtcaaaccatcattaaatctgggacagatggtacactgccttcctcctactcagatgccttccctgtccctgcaacaagcttggtgctaggctagatgccgtggcttacccctgtaatcccagcactttgggaggccacggtcggaggatcacttgagcccaaaagtttgagttggacaatatagggagaccctcatcgctacaaaaagttttaaaattagctgggcatggtggtgcacgcacttgtagtcccagctactcgggaagctgaggtggtaggatcatttgagcctaggaatttgatactacagtgaggtatgattgtgccatggcactctaccctgggcaacagggtgagaccctgtctccaaaaaaatcacacaaagtatggtgttgtagctgtgttctagaacctgtgctacgcactgaggacaaaactgtgatcccaacagaactgggctgtcttctcgcccagccccttgagcagcagagcaggcagcagatgctgggaaatgcctgatggtgtagccatgtggcagggggatgtgtagggcaccgagaaagggggtcttcttgcaggattaaagaaatgacagtcttaggctcctggtggaattggaggtagctagtgatagggagggaagtagcagagagggaggactttcaggcagagcccatgtgccacatcctgagggaagagtacagagacattatgtgtagcagagagtggagaagtagtgtccagtgtcagggcaggccacccacagcgtatgcaggggatgaataaatgagtgaatgagtgatgtggaagacatggccccatcccttgtcatccaattaaaaatgtttactgaggctgggcgaggtggctcacgcctgtaatcccagcactttgggaggtagaggcaggcagatcacttgaggccaggagttcgagaccagcctggccaccatggtgaaaccctgtctctactaaaaatacaaaaattagccaggcttggtaacgtacacctgtagctccagctacttggacctctagtcctaactaccaactactctgaggcaagaaaatcacttgaacccggaggtggacgtggcagtgagccaagattgtgccactgcactccagcctatgacagagcaagactctgtttaaaaaaaaaaaaaaggccaggcacagtggctcacgcctgtaattccagcactttgggaggcccaagcgggcggatcatgaggtcaggagttcgagaccagcctggccaacatggtgaaaccccgtctctactaaaaatacaaaaattagctgggcatggtggtggaagcctgtaatcccagctactcaggaggctgaggcaggagaattcctcaaacccaggaggtggaggttgcagtgagccgagactgtgccattgcactccagcctgggcaacaaaagcaagactctgtttcaaaaaaaaaagtttactgatttcctaccatgtgatctggggtgaagatgaagacaaatgaccttctcactgcctttgagcttgcattgcagctggggagactgatgataatacactttaaaagatcaggcagggccaaccagtgatagacactggaaaagaagttaagacagagcaatctaggctgggcacagtggctcacgcctgtaatcccagcactttgagaggctgaggtggaaggatcgtttgagatcaggagttcgaaaccagcctgagtaacatggcaaaatccaatctctactaaaaatacaaaaattagccaggtatggttgtgtgcgcctgtagtcccagctacttgggaggctaaggcagtggaatcacttgaacctgggaggtggaggttgtggtgagctgagattgcaccatcgcactccagcctgggcaaaaagagcaaagctctgtctcaaaaaaaaaaagaaaaaagagcaatctgctagcgttggagatgtgtttaaggcgggggtgaggaaaggtcagcttggtaagcttctccagataagtggtccaggaaggcctttctggggagctatctgggctgagacctgaaggaggagaaggctaagagtgtttggggtgacaggaagagcaagggccaatgtccaagcctggcatgttcagcagacagccagggccaacggggcttgcatgtcctgagtgaggggagaggaattcagtgaggccaggggggtgggtaggtgttgaccatagggatcctcagagactgtggttgtgatttttatcttaagtgcattagaagctattggaagtccccaaagccctcacatcaatcttggtatcgaggaatttctaatgatagatccagacctcaccactggagaccttgccttgggtgctgggcaccaggttgatggagaagtcagtaacccagaaagacgccaagaaacactcttaggggatacggggcaggggctgctggcagggctgacctgagcgaagaccccagcccgaggtgtggacaggaccatgctcctggcctggggcccatgtggagctgggacccccctctcctttgcagcgagtgcagtggtgagatcctgaacaactgctgcgtgatggagtaccaccaagccacgggcaccctcagtgcccacttcaggaacatggtgaggacggggcccaccctcggagggcaggtctgcccagagctgagtccttgtaagcagccgccatctccctgttcccctgtcacctcccaccctgcagtcactgaagaggatcaagcgtgctgaccggcggggtgcagagtccgtgacagaggagaagttcacagtcctgtttgagtctcagttcagtgttggcagcaatgagcttgtgttccaggtgaaggtgagacccccagccctcctgcccccactgctccaggtcacccaagaggtggaggggcctgcctcaggactcctggcagcaatgccatcggacagcctgctttgactctgtgggtccctgtttgataggttataatctgggactaacccagacaatttaggcaatgggctaagaagaagtcggttgtagtttttgtttgtttgcttgtgcctacattttgctgggaggggcttgtgtttggaactgtgggtgaggaaagtgggttgggaccaggtgtggtggctctcacctgtaattccagcattttgggaggcagaagagggaggactgcttgagtccaggagttcaagactagcctgggcagcatagtgagaacccgtatctacaaaaaaaagaaaaaagttgggcatggtggcctgcacctgtagtcccagctattctggaggctgaggcaggaggatcacttgagcccaggaggtcaaggctgcagtgagctgtgattgcaccactgccctccagtctgggcgaccgagcgagaccctgtctcgaagaaaataaagcagattgcggccatgggtggtgggtcttgcctgtaatcccagcactttgggaggccaaggagggtggatcacctgaggtcaggggttcgagatcaacctgaccaacatggagaaaccccgtctctactaaaaatacaaaattagccaggtgtggtgacacatgcctgtaatcccagctacttgggaagctgaggcaggagaatcgcttgaacccgggaggcagaggttgtggtgagccgagattgcaccattgcactccagcctgggcaacaagagtgaaactccatatcaaaaaaaaaaatacataaaaaaaaataaagcagattgggcatgttgcctaagcagagggcacgtggtggtcacgccccatcaacttgggttcctttgactcctgtagactctgtccctacctgtggttgtcatcgtccacggcagccaggaccacaatgccacggctactgtgctgtgggacaatgcctttgctgagccggtgagtccccgtgggagccctaccccagcacccccaggccctaggactcacctggggtcagccccaccccttgggcccctgctgagtggtccttcctcaccccagggccagcccagaggtgaggtgaggccagaagggctggggtgctgggcgcctgccttccaccatggccttggcactctgggttccaggttcctggactggggtctgtgaggactgtgagcttggtctttggatcctggtctgggatcctcctttggcagatggcttgggtccttgctctctgttttctgtttcctggtctgcatctctgtccctgcatgcccccaccccctgcatcggttttcttccctgcaggctgggaaaaaaagtgcaagctagtatataaaagccgccgcatttcctgcccttgcatttgtgtcacctttctggatctgtctcagtctcctctgtctctaggtgtctgtgtatcttgtgtgtgtgtgaatatttccaactccctcaatctaccttttcccctctcttgtctccctctcagggcagggtgccatttgccgtgcctgacaaagtgctgtggccgcagctgtgtgaggcgctcaacatgaaattcaaggccgaagtgcagagcaaccggggcctgaccaaggagaacctcgtgttcctggcgcagaaactgttcaacaacagcagcagccacctggaggactacagtggcctgtccgtgtcctggtcccagttcaacagggtgaggggcccagctgccagccgcccaccagggcccaccggggtctgttgctcctccacctcacagacaggttactgcctggggctagcaccccactctccacccccaaccactctctcctacaaccaggagagatgggggcccctagcctcaagaaatgcaggcaggggctataggagttgtgcttagttgtgaagccaagagcgagatgacggagggcccagggctgggagtcaggatccttgggttctgggcctagatgtgtttgctaattttcttttttttttttagagacagaatctcattctgtcacccaggctggagtgcagtggcgtgatttcagcttactgtaacctctgcctcccgggttcaagtgattctcgtgcctcagcctcctgagtagctggaattataggtgcctgccaccatgctgggctaatttttgtatttttagtagagatggggtttcaccatgttggtcaggctggtctcgaactcctgacctcaggtgatccgcccacctcggcctcccaaagtgctgggattacaggcgtgagccaccacgcctgtggctctggctctccttctgcctctctccttgctaatttttgaagacccatccattctctgtgcctcagtttccccacctgtaaaatgaggggatgactttggaggaatgactttggaggccccatccagcctagattattctttacacctcttactcccacccttgggctggtcttggacccctgtgtcttagaagtgagtttcctctctgttttcctagggtacaagttgggggctgtgtcactttatggtctgctggagtgtggtggcaagcaggggtgaagaactgggagaagactgggtgggggcaggagggccctgactttcctgggccacctgtgacctggggcaccagccctgactcgggggttcctgggccctcaggagaacttgccgggctggaactacaccttctggcagtggtttgacggggtgatggaggtgttgaagaagcaccacaagccccactggaatgatgggtaaggaacgggggctgcagggtcaggggccagctgtgggcgcagagagactgtggctgtggcccagtggtgacgctcaatgctccgtgcacccagggccatcctaggttttgtgaataagcaacaggcccacgacctgctcatcaacaagcccgacgggaccttcttgttgcgctttagtgactcagaaatcgggggcatcaccatcgcctggaagtttgactcccgtgagtgcccgttttgcccacactccagccccaaggcccggtctcttgttcccttgccccgccaccccaccctccatcgggcctgtgtccttagaaggtacccagcgggaagcttagtatgagagggctgtggcttggaaatgtattctctttctattgttttccattttggagaacctgaagtccccagccccatagactccaggacggctgggcgagtcctcctgcagtttcacgctctcccctctctgccacgacccagccttgttggtatctgctcatctggtttgctgagtagaacatcccgcatcggctttcttccctacaggctggggctgcagcgcaagctactatataaaagcccagatttctcttgcaagcctgccctaaagccccacaaccttggtcctcctgctgctggtggattatgggaatgaggctgttcttttcacagcggaacgcaacctgtggaacctgaaaccattcaccacgcgggatttctccatcaggtccctggctgaccggctgggggacctgagctatctcatctatgtgtttcctgaccgccccaaggatgaggtcttctccaagtactacactcctgtgctgggtgggtactgccccaggaccctgccggctgactcccccgggctcttccccagcccatagacaaagccttgggctgcgccgtggggacttccccaggaggagcctaggggccatgtcccctgtgggttttggcccatggggtggtggagaggatttcagggctcacaaatgaggagagggaacgagaaacccgtcccagctctcttctctgcaaagtgaaagctgcatggattctcacttctgcaccctcggaggaaggggtggcagcactgtagggagtggccgggatcattcgagcccacagatagtgctccgctccccacctcaccagctgctctccacaccctgctcacaaaccttcccccgagtggagtgcaggcagcaaaagggagaagtctctcttcttccagctgccccaaatccattggttgggtttgcttgttgattctcattctttgacaggggtgggagcagggagagggaaatcagatggccagaaaaagaaccagaaggaatgggattcaagccaggggtctcagtgaccctcaggcaggattcatcagctggtgtttattgggggtccttgggaaatctcatcccagctgagaacacaaggtgatgtgagcaggagggagactacatggggcgtgggcttccaccccacttgggagttcccagagactttggttctcaccactgttcttcccttgacagctaaagctgttgatggatatgtgaaaccacagatcaagcaagtggtccctgagtaagtgtccaggtggctgtggctctccttctgcctctttcctcctcccccagaccctgcctcccatcctgatcctgggcccagctttccgctcccccagggaacctgtctcagccctggggagggagtcccctctcctgtagctggagccccagggccgagtggggcactttgtccgtctacaccccgagaaagacaaacatgcccctcggtcccctccccaagtcagctgccccggcctccctggtggctgaagctctgttctcttccttctgcaggtttgtgaatgcatctgcagatgctgggggcagcagcgccacgtacatggaccaggccccctccccagctgtgtgcccccaggctccctataacatgtacccacagaagtaggtggtgttctcatggggtccgcaggggaagaactggggacttggccccaggctggactcctggagggctggcgggcaaaggatccagagctctggttaggcccaagtccaggaggagtgagatcagccaggaaaacagagcattttgaagctagacatagcagggtcaagtcctcactctagtactaactgtgtgatcttgggaaaatgattgagcctctctgatgctcaagtttccttatgtgtaaaacggaggcaagaatgcttgcctcatgagaatgggatgagcattaaactgagacagtgtgggtgaagcatttccacagggaggggcttggaagggcttgatacagggtagctatgaatggggtggttgttcttgagtctggtgggaacaaggtagataattaattcccttcctcactgtggatagccagggctggatgtctgggaggtaccaccttccagtgggaccactgaagatcccaggttccaatccggactccaccacctcccagccaggtggcccagagcaagcttcctgatatggccttggttttctcgtctataaaacggggtcaatacccactctccagttggctgtaaaaattggagtcatgtgctcaataggctcagctgttctaggtgctcagtgaaaagattcagctgttctaagtgctcagtgaacggggcggtgcctaccattgcagctgagcatcattgcaggtgggcagagcccactgtgtcagccacctggttttaagatgaggacacggagaggggaaatgaattccctaagattattcagtgagttagcaagagatgcgaatagagtgggggtctgcagaagccagtgggctgactgctacccagcttggggtggggtgggggcatccagccagaactggtcctgttctcatgagacgggtttgagtggagagcaggctggaggctgtccccagggagcttgaggctgtgagacatgccagctccctctgacatccccctgtctttaccagccctgaccatgtactcgatcaggatggagaattcgacctggatgagaccatggatgtggccaggcacgtggaggaactcttacgccgaccaatggacagtcttgactcccgcctctcgccccctgccggtcttttcacctctgccagaggctccctctcatgaatgtttgaatcccacgcttctctttggaaacaatatgcaatgtgaagcggtcgtgttgtgagtttagtaaggctgtgtacactgacacctttgcaggcatgcatgtgcttgtgtgtgtgtgtgtgtgtgtgtccttgtgcatgagctacgcctgcctcccctgtgcagtcctgggatgtggctgcagcagcggtggcctcttttcagatcatggcatccaagagtgcgccgagtctgtctctgtcatggtagagaccgagcctctgtcactgcaggcactcaatgcagccagacctattcctcctgggcccctcatctgctcagcagctatttgaatgagatgattcagaaggggaggggagacaggtaacgtctgtaagctgaagtttcactccggagtgagaagctttgccctcctaagagagagagacagagagacagagagagagaaagagagagtgtgtgggtctatgtaaatgcatctgtcctcatgtgttgatgtaaccgattcatctctcagaagggaggctggggttcattttcgagtagtattttatactttagtgaacgtggactccagactctctgtgaaccctatgagagcgcgtctgggcccggccatgtccttagcacaggggggccgccggtttgagtgagggtttctgagctgctctgaattagtccttgcttggctgcttggccttgggcttcattcaagtctatgatgctgttgcccacgtttcccgggatatatattctctcccctccgttgggccccagccttctttgcttgcctctctgtttgtaaccttgtcgacaaagaggtagaaaagattgggtctaggatatggtgggtggacaggggccccgggacttggagggttggtcctcttgcctcctggaaaaaacaaaaacaaaaaactgcagtgaaagacaagctgcaaatcagccatgtgctgcgtgcctgtggaatctggagtgaggggtaaaagctgatctggtttgactccgctggaggtggggcctggagcaggccttgcgctgttgcgtaactggctgtgttctggtgaggccttgctcccaaccccacacgctcctccctctgaggctgtaggactcgcagtcaggggcagctgaccatggaagattgagagcccaaggtttaaacttctctgaagggaggtggggatgagaagaggggtttttttgtactttgtacaaagaccacacatttgtgtaaacagtgttttggaataaaatatttttttcataaatttgctgctatggctcctggttggggcgttggtggcctccctgggtgatgggaacccctggagctggttgttctgttccttcccgcgtgcatgcctgatgctgtcatttttagtcttaaattttaactctgcccgctttgctgtggttttcagggtgctggccacccctggaatactgtcaatgcttctcagaagggtaaggagccagtttagggggcacagattccttaaaaagcaggggactcgaggtttggggaaatgatggagatgggcgcgggtgggcagaactctgacccaggcttctccttagcagctgctgctcccagcagcctcgaagctggcggctgagggcccggcgccaagatgcttctcaaccctcggggccaggggcagtcccagagccgcaacaaccgtcccatcctcctccttcccagagaccagcaggtggcaccacgcggctgcgctgttttcagctggctgccggcgactgtgcgaggcggaggtgcagcaagcgggaccggctcgccccggctggacccccgcactgccggctgcagccagtccctgctgtcgctggggcccttgggctcagggacgcgcgctccctgggcggggctgggagccaggtttgcgggcaggttccttctgagctcagagctcaagcgagggagaggggcggcgcgtgggccccaagagggaggtgcagggggcccagagcagggggaaggcgggggtgggagaagagaggaggggaggggacgggcaggtgccaccgccccagggggctaatctgatccatctctgcgagggaaggtgctcgctcgtagctcccaggcgcggtctccagggcgctggggcacgtgtaggggtggggagaagccctgtgggcgcccgcgtagctgaggttggggcgcctttccctgcattatcaccgctggctgccgggggccctgcagccaccaccgggtgtctgcgtgttgtccccgctgggtgaactgaagggaaagtgataaaggagccaactgtggaaggggaggccttggtgcggtgggagtatctaccccccaccccgcttaggtggcttatctgaccccagacaggacgaggccgctctggggggtaggagggggccggggagggaggcctccactctgacacctttctgccgttggactattgacctcctgctcctccaggcaccccttacctccgggctggtggctaacataagggggttggcgggggggattaaggcaaccacctcctctcaagaccctttccggcccttatcccaggccccacctgtgtgtgaggccccctcagaacttatgcaggggaaaaggaagcctccaccagccaaacagagctgccatgctatcagacggttcctatataacgtttatttctggaagttaaagtagatacagcaatataccaaaaaaaaaaaaaaaaaaaaaagacaaaaaacctcacaataatataaatttttacactatgaagtacacattggaatttgaatgcagtggccaggacagcagcttataaaccaccttataggtaggtaagcaacccacgggattccctcggctgggctggggatggggagggggcagtggacaggaagcgggcagggcctgaggaccctgttctttaatgggccacaacagggctcagctcctctcagaacttttgctacaatcagagttaagaccagatacatgctacctaaggccatgaacttgacaatatctgctccagagaagccctgaaccctcgccctaggtccctatgatttaaacccaatggtaagcccaagtctcacctttctaaatattctgtttatcagttaagcttattatgtactgaagagtgttgctggagaagtaagagctctgcatgacacatcaactgtctccaggcaggaggactggggcgaaccctgttcatcttagagaaggtcgtctcccccttaattcagagaccagctaatttgatttaacaaacagaattccacagaaactctgatcagctgaggcaaggtggttttgagttgccaaatccggccatgcctctgagtcagaggcagcccatccagcacgtgctaggtgttcccatacgcacaggagaggcgagctagccagccaaggcgggcaggcggggaggccctctagctgttctgcctcacctgtggggccccagcagggaggagtcaccagcctcagagggaggccaggtatacaccctcatacgagggcagactcaagtttatcagtaagcctttgccctgcatgaactgaatgaagacgccattacaagtgccactggatatcaccaagaaactggctaagaaccatattccctgagctcaaccagacacgtcgctggggccccatagtgtgcatcatgtccaacctgtaactctctccccctcttcttccatgaggtcctgagaccaggattcctaaaacaaacaggatgagggacctttagacacgcaaggagacatgcctctagcaggatcagggggactggggtcgggagggtggggcaggaaggaagccagaatcagaagtatcccagccctgataaggcacccacagaaacaacctagcctctgaaacagcagatcaagtccagggagaaagggagtcaaggttgtaagcaccctctgcccagccttactcactaaaaggccaatacattacaaaggaaaataagtctatttataaaaaaaagtctaaaatgcttagattctccttaaaccttcctatttcaacaccaaaggccaggttgcagcttcagatgtcttaagggtttgacctgaagcccgtttcagggattatataaattaccagcctgaaggaagctgaatgcttaaagcaccaaggaggctgttaactgaagtttcttttttttttttttttttttgagacagagtctcagactgtcgcccaggatggagtgcagtgtgcagtggtgcaattttggctcactgcaacctccgcctctcaggttcaagcgattctcctgcctcagcctcccgagtagctgggactacaggcgcccaccaccacacccagctaattttttgtacttttagtagagacggggtttcaccgtgttagccaggatggtcttgatctcctgaccttatgatccgcctcggcctcccaaagtgctgggattacaggcgtgagccaccatgcccggctgcttaagtttcttaaatacagaaaggctatgctgatacagtgttttttgccctttaattgttattatttcttaatttaaaaagaaacctagggcttagatagtcctatcttctatttggatgtcagcaaggttaaaaagtgcaatgccaggagtatgtagctataggtggcctgtggcatttgcttacagaaacaggcagaaggatgccgcaggcaccaggaggcacttgtctaagaacaacaacaacaataacaaaaagctgctgagaaaggagggcaggggaacaaaacaacacaagacatttcctttttctccctctagccaccccccgccacatcccctgatcatgggtctcagagaacacatccttatttgcatttagataaaagcagatcacccacattcactcatttctctatttttaaaagtgcccagattgctcaaagatagcagaagtaggagattaaaaaaaatctggaaccacaaagttagtagtttcagatgatctggggtttggctgtgtgaggggtggcagaatgcaggtaggcgcctcagtcgtatctttctgcagcttccgttctcagctcctcacatgggggaggtagcgcactccgaggtcaactccatgtcaaaggtgagggactctggagggacagacagggaaaactagttcagttgtccaccctctgcaactggcaggccacgcccccagcccttcagaggacagggcccaggctaccactgctatccaatctcctgccccttaaggcccagggatggtcagaaaagccagatttaccctcctccctggaggaccctgcctcgggaagggtcctttctcattcccaccttaactgattcccagagctccatgtttacagaagctctaaggctgtcctgagatcttctgcccttgatctactgtttaattcaggagccccgagacacacgtggccaccaagcatttgagatttggtttgtccaaactgagctgtgctgtggctgtcaaaagcccactggattttaaaggcttagtatgaaaaaaaagaataaaaaaaggtctcaactttttctttttagtttagttttgtttatttgagatggagtctcactctgtcgcccaggctggagtgcagtggcacgatctctgctcactgcaacctccacctcccaggctcaagcgatcctcccacctcagcttcttgagtagctgggattacaggtatgcgccaccatgcccagctaatttttatattttagagattttggtcagactggtctcgaactcctgacctcaagtgatccacccacctcggcctcccaaagtgctgggattacaggcatgagccactcacccagcctcaactttttctgaaatgttaaattgagagtatgttggatttagtgggttaaataaaatatattgtaaaaattaagttcgtctatttccagtgtggctgctagaagatttatactcacacatgtggcattcataccatctcttttggaaagcaaagctctagaatctcctaccattccgagtgaccagctctcggtgtgtacatgtgagagcatcacacaaaggggaccaacttcccttatagggacaaagtctgtcaaccaaatactcaccaaactgccctcctgctgagggttcagcaccttcaccattatttccaaactgcatcaatgaatctaaagtgcggggggacatcggcaggtcaatggtattgctgcaggtcgttctgtaggaaatggggggcagcaggaggggaaacggggggttgacaagacacaatggaaaaaaaaaaaagaacaaaacacacacacacaagccatcaaactctggtctccaacagaaaaataaaagctcaagctttttaaacacacaaggtcactttgagtactaaacatagcccaggggcttccaacctttggcagattaactctcacccagtgtcccattcccagggataactgaggatattagaaatgaaggcaaaacggggaaaggaagccacttacggtgtcacacagataaacttggtcttcaggtatggggcagcgcctgggaagaagaaaaccagttttcttactgactgtgacttcgcattcagtaagcagagctggaggaagccatctgcctcggcaggactgatttgaaactcactcatcctcatgccaagattgtctggaaagctccatctgcccctcagggttgtctgccctcatttatactatttgatctcccaggcactagcagctgtgaacttcagttctttgcacaaagctgtcctgagctgcagagacttttcagcataaccttttcccacctgaccctagactaatgccaccttgtgtcccttctttccctagattatgtaaaagtttaacagcctccacgtggtctgagcattctattccggcctggtcatatctcttagataacttctctgcatgcaggaaccgagcctgtgtagtctttgcatggtgtccagcctaaataccaatatcaccaagtctttaaagaacatggagactgctaatgcttgtggttccaaagccaaaggttatatctcttattcctaccagcactaatctggcctctaccacatttttggatgagggcatgagtaactttctagttggataaatacgtcaatcaaaaagcaccaaagagaatgtgactttgtaaggcagtacaattgcttcaactagaagaccggagacctgggtccaggtacatcttcaatagctaagagacctggagcaaggcatggtctctctcttttgttgctgttgttcttattgttttgagacagagtctcactctgttgcccaggctcaagtgcagtggcacaatctcggttaccgcaacctcctactcccaggtcaaaacgattctcctgccttaggctcccaagcagctgggactacaggtggcaccaccatgcctggctaatttttgtcttttttttttttgagacggagtcttgctctctttcgcccaggttggagtgcagtagcgccatcttggctctctacaacctctgcctccagggttcaagtgattctccttcatcagcctcctgagtagctggattacaggcatctgccaccatgcctagctaattttttttttgtaattttagtagagatgaggtttcaccatgttggccaggctggtcttgaactcctgacctcaggtgatccatctgcctcaccctcccaaagtgctggattacaagtatgagctatcatgcccagccttggccacaatgcccagcccatattctcttttatgtataaaataagagggagggggaagacaaggtgccaattttctatgagctttgtcatttataattcttgttctacagttagaaatgcgttgacgggaataaaatgaattttagatgctgaatgcttacaccaagaggtcaaggaaccttggggatactggcatgaaatctggggaattcaggtgaacaaaccattgagaaggcatggggcagggtgaggtgggctgagaacagcacggtcataaaacatgaggcttagacagaacctgagggatcagagagcatgatgaccatgtgaaagaaggcactgcagagtggctcttgggctgccatctgagtttactttgggccaagaaactgatcaattcagtgcagaattcaaaggagctactgaggcaagactctagtgtcttataaatccaactgttttggcccagcccttagggagctgacaccctagacagaaaaggatttaattctccagcattcaagatagctgaggccaggcacagtggctcatgcctgtaatccctgcactttgggaggctgaagcaggtggatcacttgaggccaggagttcaagaccagcctcaccaacatggggaaaccctgtctttaatgaaattacaaaaatagctgggcgtggtggcacgcctgtaatcccagctactcaggaggctgagacaggagaatcacttgaacctgggaggcagaggctgaagtgaggtgagatcgcaccactgcactccagcctgggtgacagagtgacagactgtcaaaacaaaacaaaaacaaaaacaaggctgggcactgtggctcacacctataatcccagcactttgggaggcccaggcgggaagatcacttgaggtcaggggttcgagaccagcctggccaacagggtgaaacccggtctctactaaaaatccaaaaattagccaggcatagtggtgcatgtctgtaatcccagctactcaggaggctgaggtatgagaatctcttgaacctgggaggcagaggtttcagtgaagcaagatcgcgccactgcactccagtctggacgatagagcgagactcaggctcaaaaaaaaaaaaaaaaaaaaaaaaaaagctgagaaaaatgacttcattgtgtggctttgtacaagattgtaaatgtactttatctaatttgtaagtggctccgaacctctccctcaagccataaggaaatgctatgtgggcttccagtagagaaggaagagagaagagtcttgggaggataatctaacctgagaccctcataccataatactcttgtgatggaaatagagaggaaatggtcacatgctcatcgtcctgaaggcacccattttaaaataacacagggacacccccacacccgtcaccacactcacatggagtccctcagggcacactcctctcagcaaggcaaggcaaattactcaagtaattagttcctttctcctgatgagtgcctggcccctgaggaaacgctgacatcgctgggcaggaaaggacctggcctcccagcccacaggaagggcgatggtaatggaggatgcagcctcagactgggaggtgggaccttgaaagcaaaatgagtcaaaaggaccagccgtgggaccccaacgtcctctgcagaaggaacaaagagccgtgtggcaggggctgataaacagatctcccaactgaagcacacatgcaaagggagataggtggcagacaggaagtgagtaactcttacagcaggaacaagactcaggaccccaacaaaggagaaaggcaacggtcaattagctccaactccctcttccaagccccattctgccccatctcaagaaatccctcagaaggaattcctaggaaaaagtgggagggaagttggtaggtttctgtgtgtgtgctatttggacaaaaatagttttttcaacagcaactagggcaaggcgccaaccctaaaggatcacattaaagagcccatcattaggccaggcacagtggctcacgcctgtaatcccagcactttgggaggctgaagtgggcagatcacctgaggtcaggagttcgaggccagcctggccaacatggcgaaaccctttctctacaaaaaatacaaaaatcagctgggcatggtggcacaagcccataatcccagctactcgggaggctgaggcaggagaattgcttgaaccgggaggtggaggttgcagtgagccgagatggtgccactgcactccagcttgggtgatagagcaagacttagtctaaaaaaaaaaaaaaaaaaaaagcccatcattggctttatgattacagaaagttaaatcaaacaaagaatggcaaaccagagactccccatcaagacctgcacaaagaacccagagagtcaaaacagcaagtgctgaaggggaacagacagggctaccccctccacactgaggacagctgcagagattacagttttgtttcgtttttttctttctcttctttgtgtgtgtgtgtgtgtgtgtgtgtagtggggtcttgctatgttgccaggctggtcttgagttcctggcctcaagtgatcctcctgcttcagcctcccaaagtgctaggactgcaggtgtgaacccccatgcccagctgagattacagtatttttaatttctctctcttttttttttttttttttttggtgagtcaaggtcttgctctgtcacccaggctggagtgcagtggtgcgatcatggctcactgcagcctcaacctcctgggcttaagcaatcctcccacctcagcctcccgagtagctaggactacaggcacaaaccaccacacgtggctaatttaaaaaaaattatttttgtatagatagggtctcactatgttgtctaggctgttctcaaactcccaggctcaagtgatcctcccgcctgggcctcccaaagtgctaggactataggcatgagccacttcacccagctaaaataatttatatataacatataagtacatgtcctcttacacattaaaatataccttattttcaatagttgcacactctaaatactaatcccttgcccctccacccagtcactgtcttccccttcaaacgtgatgctcccagctcttctactctagtgtaaaccatactcccatgcagctaataataatttcctccagaaaccctttcttcagaccatctggcacactgacatggttcagttacaggcaaaaagccatatgctgggctgaaatctgggcctcaaaccttctagcatctactaagaagcactgtgccagcagggcatcctgttaactgccctcactttcccttctcgtgtttcaggcatgttttgggggacgtatgtgtattgatcccctctttatttttattttttgacacagtatctcactctatcagccaggctggagtgcggtggcatgatcaccgctcactacagccttgaactccttggctcaggtgatcctcccacctcagcctcccaagtagctacgactacaaatgcgtgccaccacaccgggtaatttttttggattttttgtagagacgaggtttcaccatattgcccaggctgtatcccctctttagactcatgcactctctgtggagcaggaactacactactctaagtgattctgattctcctctcaaatcccatcggtcaccccaacaaaagcactcactacaattctttcccataaggagaaataattatcccccaggttattcaggcatttgcctatctatcctccaaggatcccaaaatttccaacttttcccaaaaattaaatgccaggaacatggaaaatcaacaactacctgggtcagcttcaggatgctcctggctctctggccgacaatactttccgaatgcctcctccttgggaatgtcaggatagagatagaccagtggagacaccaggatattggtagcatccatgatcttatagcccatgatgatttcagcaaatgacatgttgttcagctgctgctttgtgtatggttccacggactggatctgggtcttacctgtcacaggacatgggaaggaaagatcatggaacctacagctaggtcatctcagagaaaactgcccattttttctttcctcgaaggggaaaagacttaagccaccctagtgttgagaccctgaacaccctgttcagtggcctggcactgtggaaatattcaggctggcttctaattaagaagaggctactagttgggtcatagaaaataaacttgaatataactacttgcgtaagatatattaacagggttaagtagaaaaagagatgaagaatacaatttaaattgcaaaattctcaacaaatagtcactggagcaagcaaaacaaagcaaaccaatccttcagctggaaggatttagaagtcacgcaaatgtgttttgcgagtctgagtgaaacagggagtcaaggccatctccacccaccagggggcagtaggtgcttgcaactagaagcagtgatgaggcctcagcagccaccagcaggtggggtgggtgggagcctcccttaccgctgatgtccttctccacccaagtgaaagtgacgcctccttctttgctgctttcactgaatcttagcaggaaggtgcctggaggcttagtgctcaagatggcccgctcccgctccttactgataaagcccatgatgtacctggagccaaggaggaggaacaatgttgttattgctaacagggcatccatcccctgccactggcttgctgagagcaggggacttggttacatctgtgcacactctgtccaacctacccttcgttccaaagggccaggatgtactttttcacaaggtcaatgatattgtccagccagacccagaaggagaagcccttgccagccatgttttcctggagaaaagagtaatgggaaagccaagtctactgccatcccagcccttcccttcctaggggtgcagtgcatcacccaaatcctcaggcccgtctaccttcaggcaggtcctactggccgctggaccaagagttcagggccttcaagccagagccctcaacgacagccgtgcaggtgagcattcccattcccacgagaatttaacaagattgcttactttgcaaaatttagcccatgtgatctgacaccctgaataattcacaccaggtcctgaaggaaagaaaaagagtcaagtagtacattttcagcttggggtcaagaggttatttcttaaaacagaacacacacacattcatcccacaatgggccacaaaataatcagctttcacatctttgaaggtaggcactgttgtgtgtgtgcacatgaggacaaacactatcccatcatttgactcacttgtgttgctgggtagcccagcagggatggagggtgatataacaagtccccctgctcttcccaacctcgggtggtaggctgggaaccaacagcagcactcactaacaagctgacatcgggtgtcagacaggtgtatttggtggcaacagctttattagaacaaagctacttctagcccaggtggcacataaaatattccactaattcttttttaaaaactagcctacgctgggcacagtggctcaagcctgtaatcccagcactttaggaggccgaggtgggcggatcacgaggtgaagagacggagactatcctggccaacatggtaaaaccccgtctctactaaaaatacaaaaattagctgggcgtggtggtgagcacctgtagtctcagctactcgggaggccgaggcagaagaatcgcttgaacccagaaggcggaggttgcagtgagccgagatcacactactgcactccagcctgggcaacagagcaagactcgtctcaaaaaaataaataaataaataaaataagacaaaaaaaaccaactagcctatagtttattaaaaaaatggacagggaatgtcaagcctttagtgccaccttccaacacacacttaaaagatcttctaaagttagatagagtgggtgaatgagacagcaaccaggagaaaagaaatctacctcccacctcaaaaatgatcacctcgactgaaaactgcaaactgtctctgcaccccaactccccaactcccctgtttcctggcaccagcacagcgccttgctcaggaaagaaacatggcctaatgctcagtagacatggcccaaatgaacagccctatgggccggatcccttttctgggcgggtgggcgggagggagaaggggtgaaatgcggacccaagagtttctctgccagtgtagtcagctgctcgatgctcagtcctcgcttggtggtggaggagaactgccagctcaggacctcggccacttgatcccaggttccaattgggggcttggtaaaaaagtttacattctattggaaagaacacatttgcttgtttagatgagggatggtgctcattgtctatactaggtacccctaagtcgcaagagatcccggggcaccaactaaaaggagggggcactaaccttgggattgttggtcagcatgttgtaccacaggatggacgcccaggcatttggcatctgacagatgttggagatcaccacaactggcaaggagtgggtctgcggagggagtggggactgagctggggaggcagaggggctctcacagccttggaaatctcttcacccgcatctcacggggctcagaatgaaaggacatgccataaaccacacctgctgccaactctaggcgaggagtgtgagtgagtcagctcagtgagcactcatagtggaaagaatgcccagcgtggccacacaactcaggctgcagtcggaatataccggtcccttgtaaaacctgacttgctcaaagcttgactcacaatccacagattccccatttttaagaccttggaggcattctccaagacttgaagctgtatcttcacatgaaacagggaggtctcaggaatcaaagaccaggattcctgcttttctaggtatatcttaatttaaaaatcaagaaagttgggaaaggagaatgtcattgccacaattttctgtatactaaacacactggctgctaagactcttatgcccaaactttataaagtcagttctaatttcttttttttttttttgagacggagtctcactctgtcacccaggctggagtgcaatggcacaatctcagctcactgcaacctctgcctcccaggttcaagtgattctcctgcctcagcctcccgagtagctgggattataggcgtccgccaccatacccagctaatttttgtattttagtagagacggggtttcgtcatgttggccaggctggtctcgaactcctgacctcgtgatccacccgcctcagcctcccaaagtgctgggattacaggcgtgagccaccgcgcccggccaatcaatttctaaatagagattttcatatcaagtttgctgaaagctgaatatacacacatcttctaagcattcaagcaagactttattgccagatgggatgccaaggatttttttggagaaaagtaagcaaaaataaacacagtgttaagcaaacagtaatcattccaccttctcttgtaaaaatcccagtggaagtttttgtcctgagtcacccctgtacgtagcctctcaccgattctgctgcagaacttacctctaggtcaatcttgaggccttggtgatacacctcggtctcaaaggtgatcaggtgcagctcctcagtcacaatcagggaagcctacagtaacgagaaggacactcttaggccaggtgtggtggctcatgcctgtaatcccagcactttgggaggccaaggcaggaggattgcctgagcccaggagttcgagaccagtctaagcagcacagcaaaactccatctctgcaaaaaatacaaaaattagctgggtgtggtggtgcacacctatagccccagctactcgagaggctgaggtgggaggatggcttgagcctaggagatggaggctgcagcgagctatgattgtgccactgcactctagctggggtgacagagtgagaccctgtcttaaaaaaaaattaaattaaataaaaaaaaaggctgagcgtgatggctcacacctacaatcccagcattttgggaggccgaggcaggtggatcacatggtcaggagttcgagaccagcctggccaataatttggtgaaaccccgtttctactaagaatacaaaaattagctgggtgtggtagtgggcgcctgtagtcccagctactcaggaggctgaggcaggagaatcgcttgaacccaggaggcagaggatgcagtgagccgagatcacgccactgcactccagcctgggtgacagagtgagactctgtctcaatcaatcagtcaatcaataaaaaagagaaggacacttttcctcagagagaatggcattcagtactaacagccacagccaaggaaagtgacatgccaagcctcaccacaccaagaagggtaagccaccaggtggtcacaaacaaactgccagggacacaacttgctcggcacttactctcttcaacaccaagaacttccaatgctgtgatcctcaacctaatcctttactcagtttgtattataatattacatagatccaattggttatttgtaaaatacgtaaggcacaaagaataacaaaacaatatgaacccaccattcaatttaaggaaaagtccatcactcctaaaattctctgggtgcccttccccaaccccatccccttccctcctccctcagaaataactgctattttgtcttttgggtttatcatttcctagccctttttgtcttgttttgttttgtttttttacagttttaccatatttgtttatctaagcaatgcaggtattgtttagtttgggacatttgtgaaccttacacttatggactccaatgaattcttttgggattcacttttcacttgatgtgaaatgaatccacatggttatgtgtatctgcagtgtattccttttcacagctgcggagtattccattgtgtctataccacaaataatgtattcattctaatgttgatgggtatttatttgggttgcatttagagcttataatcaggctgatgtccactttatatatgtctcctgggacatatatgcaaagatttctctgctattaaatcctgggaatggcaccgttggtttacaggtatgttcatttttatactgccaaattgttttccaaactgactacaacaatgtctcacatcagtacagcaaccttattttaagtaagagttgtcaatgaattctcaaaaattgaattctagtctgggcacagcggctcatgcctgtaatcccagcactttcggaggccgagatgggtggatcacgaggtcaggagttcaagaccagcctgaccaatatggtgaaaccctgtctctactaaaaatgcaaaaattagccaggcgtggtggcatgcacctatcgtcccagctacttgggaggctgagacaggagaatcgcttgaacctaggaggcagaggttgcagtgagctgagatcgcaccactgcaatccgatagaacgagactccgactcaaaaaaaaaaaagaaaaaagaaattaaattataattcatttttaatactatttttctgattataaaagtaatatattcagtttaaaatgcaaatatcacagagacagtctagaatagccatggataccaacagcagcactaatacacatagcactgctggtatattcctccagaatttcttaatatacatatgaatacacataagagtatagtgtatttttaaaacacatatactaataatactattcaaattattttacattttgctttttcttaatatgtcatgtacattttcccatatcattgcatacaggctacttcactctactgtcaagtaaaattccacatttttaaaaaggactgctacattttattttatttatttttttgagacagagtttcactctgttgcccaggctagagtgcagtggcaaaatcttggctcactgcaagctccacctctcaggttcaagcgattctcatgcctcagcctccccagtaactgggactacaggcgtgcaccaccacacccagctaatttttgtatctttagtagagacgggctttcaccatgttggccaggctggtcttgaactcctgacctcaagtgaccagcctgccttggcatcccaaagtacggggtgtgagccagcacgcccagctaggactgctacattttaaagaggaagaattgttcaggggacaaatgtaagaaaaagaacggggcatcacaatttttaaaaatgactgaaaactagccttccgtcacatttacctttttttgtttgtttgtttaaagtttattcttgacaataagaatccaataatctgaatcaatgaaaagcagaaaataagggggataaagaacaagatgggtttttgtttgttcattttattttatgtactcttttcctaagcaagctaatgcaaggtggtcatttattttaaagtttaactcaaatctgttgcttttacaccctctatcccacctcagtgggagagaaaaacagggcactaaaaatggagccaagcagggtcagccgcaggagctggatggggaatttggaaagccccaggcaaggtggaaagctgctttataccacatgggtgtggagaacaactcagcaagggactttccacttctccttaaggaggagccaactcccagatattcacggaaatgttccaagccagagagctccatggcacatggaacttctgttcatgtcactttggcctgaagtgactttttggaataactacagctgaaagaacaggttgatgtttctaattctggggattaagaaggatctttacccctctctccctcaaggaaaacaccccagttgtctttcatccccaacaaaacttacatcacaattggctcggcccccattcccacatctctgctccctcagggtctgtaagaaaagaaaaaggcaggtgtcctgtgaggctctccctagccctctccggcagccagaggccctttgtgaaggggagctcctcccacataccaagtgtttgaattctgcagagaggctgccgttgttggattcttccatgttcatcacttttgtgtttgtgcccagaatgttaaatttccgggatctgaatcacaggggaacaatcaactatgtaggtgaccaagtagccggaggatgaagttaggttaaacggaacaaaaggaagcctctaggctgaacttaccctctgagagctgcaacgtccccagagtctctgtaagaacacagactgttgttaataaaataggctctgtgtttcttcaaaaagcctactttgaccacctgttatttactgtcatgaaaaaacctctgtgctcctgggcatttctttaaactattcagttacagttgatcagcgcaacataacacctctgcgtagcaggcacagttggttgcctccccataggaaggggaacctatgtttcatattgcatatgtacttattaaacctaccaccttcgtcaactcccttatttcattattttccagtgcatcctcatgaaatttccacataattacatcaactaaaaataagaatgcattttatcttttcttttttctttttttttttttgagatagtttcgctcttgttgcccaggctggagtgcaatggtgtgatctcggctcaccacaacctccacctcctgagttcaagtgattctcctgcctcagcctcccgtgtagctgggattacgggcatgcgccaacacacctggctaattttgtatttttagtagagacaaggtttctccatgttggtcgggctggtttcgaactctcgacctcaggtgatctgcccacctcagcctcccaaagtgctgagattacaggcgtgagccaccgcgcccagccacattttctcttttcttttctttttttttttttttgagatggagtctctgtcgcccaggctggagtgcagtggtgtgatcttggctcactgcaaactccacctcccaggttcatgccattctcctgcctcagcctcctgagtagctgggactacaggtgcccgccaccacgcccagctagtttttttgtatttttagtagagacggggtttcaccgtgttacccaggatggtctcgatctcctgacctcgtgatccgcccgcctcggcctcccaaagtgctgggattacaggcatgagccaccgcgcccggcccacattttctcttttctaatgtcgtcaaagggtatatgtattttacatcctgaaaggtattgtgaaattttgcgtattccattatatggtaaagtgtggaacaattaaaaaaaagagatctattctttccacatgctatgtatggaaagaatatataacgacgtttcggtcaacaacaaaatgcatatatgatggtggtcccataagattatcatggagctgaaaaattcctacttcattgagatgtgttacaattgcctacggtattcagcacagtaacatactgtacaggtttacagcctacgaccagtaggctctgccacatagcgtaggtgtgcagtaggttctgccacccaggtttgtgtaaggactatatactctacaacatttgcacaacaaaattgcctaatgatacattttgcagaacgtatcccagtcgttaattaacacatgatctcagtcttatatataatatgcatgaatgacatgtacaagtaaaaaactaaacaaggaaaagagggactggttgtcacaatagcaaccacaaatcaaatctgtacccccagctttgtggctttgttcagacacgtaaatgacaatgcaccccaaggcttttgaaaacttttgtccacaaaatgaagatctctgaataaagacagagtctctagttcaaatgatgtctgtcaaagttctcatttttctattcctcatttgaaaaacagagctaagataggagtacttacttgtcaatgcacactttaattttaagctgataattcaactcagggaatttgaccagcaacctatttaaaaagaaaaaatccaaggaaaaaaagtcagtaactctcccataaccttttcttgaagaaatgtaaaattcataattcttcatttccaacaggtaaataggccaagctgtctataattacaggctcacatctataatctcagcactgtgggaggccaagctgggaggatcccttgagcccaggagttccataacagtctgggcaacaaagtgagagcccacatctataaaaaatttaaaaattagcggggtgtggtagcatgtacctgtagtcgcagttactcgggaggctgaggcaagaggatcacttgtgcccaggagttcaaggctacagtgatctatgatcatgccactgcactctagcctagatgacagagcgagatcctatctctctttctctttttttttttttgagacagtttctctcgttacccaggctggagtgcaatggcgcaatctccgttcaccgcaacctccgcctcctgggttcaagtgattctcctgcctcagcctctcaagtagctgggattacaggcgcgcgccaccacgctcagctaattttgtatttttagtagagacagagtttctccatgttggtcaggatggtctcgaactcccgacctcaggtgatccacccaccttggcctcccaaagtgctgggattacaggcgagagccaccgtgcctggcccctatctctctctttaaaaaaattaaaatagggctgggtgcggtgactcacacctgtaatcccagcactttgggaggccaaggcaggtggatcacaaggtcaggagttcgagaccagcctggccaagatggtgaaaccccgtctctactaaaaatacaaaaatcagccgggcatggtggcaggtacctgtaatcccagctacttgggaggctgaggcaggagaatcacttgaacccaggaggcagaggctgcagtgatccgagatcacacctcagcactctagcctgggtgatagagaaagactccatctcaaaaaaaaaaaaaaaaaaaaaaaggccgagcgtggtggctcacatctgtaatcccagcacttttggaggccggggtgggtggattactgaggtcaggagttttgagaccagcctggccaacatggagaaaccctgtctctactaaaaatacaaaaattagccgggcatggtggagtgtgccggtccagctactcagggaggctaaggcaggagaatcgcttgaacctgggaggtggaggttgcagtgagttgagattgcaacacgcactctggcctggccgaaagagcgagactctgtctcaaaaaaaaaaaaattagccgggtgtggtggcacgcacctctattcccagttactcaggaggctgaggcacaagaatcacttgaacctgggagatggaggttgcagtgagctgagatcatgccactgcacaccagcctgggtgagagtgagaccctgtctcaaacaaaaacaaaagatgagtatcactccttcaagccaaaggtactgagaaaacatctaagaactaacaacttaaagttgtgagagattcacaaaaggataatcaaagccatataatgaaaaatattacaggaacacatgctgtgcagctggcattttgttctattaatcctgaaaccgaacaccatactaagtttctgaggagggaaattttgctgcagaaggtcaaaaccccagcacacctgttctgacttgagtgtgaaagtaacacctcaccctacaggcccaccacccacctgccctggggcctctcagcttccccatcactaagccttactctttcccttaaaatccacagggaagagtagcctcaaagaacagaaaatagatgacattattttgtcccttgggcagaaggagaagctgtggcctgagactccaggtctacaatcataggaatatgcccaggtaccttcaaaaagatgactgctcttttgcttttgacatcagaatcagagagcaagcagatagtatggcaacaaatttcaaccccgcaacagtgtactgcctgtgacaccacacctggaaagaatgaccctggccaccaactctaccctcaccctaacagtgtccctcagtaaaatctctactggaaatggaagtggcatggcctacctgactttagtagtgaactggacgccggtcttgatgacgaggggccggtcaggatgcatgggcatgcagggctgccgctccaccacaaaggcactgaggaaagagaagatgggctcacgcgccacggccatgaccagaagtcagcccgcctctcactctaccacgtgagtctttaggtattttttagatgagggaaagggacaaggatgctaaattaccttttcattaagtttctaaacagctccacgattctctcctccagcatcggccggtgctgtacaatggggtcccctttgtaggaaactttttgctgcaactcctccagtttcttaatttgttgacgggtctgaagttgagattctgctaatgacgttatcctgccaataaattaagaaagatgctaattaccaaagtgaatgtatacaggtgagatggagaaggggaaggaaatactgaagacatggagaccactacaataagaacaaggaatttttttattgtggtgaaatatatatagcatgaaatttacaatttttcatcttaagtttacagttcagtgacattaagaaaagaggaatttttcaccatgttgggtggatgctgaaaaaataaataaaaaaagaaaataatttatttatttatttattttttgagctggagtgcagtggtgcaatctcggctcactgcaacctccatttcccgggttcaagtgattctcctgcctgagcctcctgagagattacaggtgtaagccactgcgcctggcctttttttttttttttttttttttgagatagagtcttactctgttgcccaggctggagtgcagtggcacagtctcagctcactgcaacctccgcctcccaagttcaagtgattctcctgcctcagcctcccaagtagctgggattacaggcacccaccaccactcccggataatttttgcatttttagtagagatgggattttgccttgttggccaggctggtcttgaactcctgacctcaggtgatccatctgcctcgacctcccgaagtactggcattacaggtgtgagccaccatgcctggccagaaaataatttattttaccttttattactagtcccttcctaaaatctcaaatttctaagagggggctgggcacacaagaagtattaaaatttataccactaggaggcattgatggagttatcactggaaaatgacaagcatctgagcccagatatgcagaacacgaaatatggaatttagcacttactttactcatcctaacttgtctatgaacataaagactcagaaaaagagattagacagctcccaaagatgggtttgagccagctctgtcacacactatctgtgcaagctttgccaggcccttcaccatcatgggccttagcatccccttgcatgaagagaagggcttgaactacatgagccctttcttttctttctttctttttttttttttgagacagggtcccactctgtggcctagtgcagtgcaatggcatgatcatagctcactgcctcctccaactcctggacatgagtgatcctcctacctcagcttcctgagtagctagaactataggtgtgtgccaccatgcctgtttagtttagtttagttttttgagatggagtctcactctgtcacccaggctgaagtgtaatggcacatgtctagttttttaaatttttgtagggatgggatctcactttgttgcccaggctggtctcaaactcctgggttcaagtgatcctcccgactctgcctcccaaagcattgggatttacaggcgtgagccacaacacccaatccccataagccttttcaatgtcagccttcaactgatcaaaggacatgacattatgtttcaaaatattgataacatgcacaaggaataagtgaatagagagggagaaaaagctcattaaatctatctccaagaatagagatattaggccaggtgcagtggctgacacctgtaatcccaaaaatttgagaggccgaggcaggtcgatctactaaaatacaaaaaaatagccaggcatggtggcatgggcctgtaatcccagctacttggaaggttgtgactaagaatcgcttgaacctgggaggaggaggttgcagtaagccaagatcatgccactgcactctaacctgggtgacagagtgagactctgtctcaaaaaaattaaaaaaagagagaagttagcatcattccatcattctttgatggtttatcactagtgtaacaaagaccaaaagaccagaaagacagaaagtgaaaggagagggagggggaccgctgcagggatttctgaactcctgagctcttttctggcacttctatcctcccattcccagaacttaagcttcttcgttccctggtcaggaagcatttaaaactgctttcagtaaattaacaacactcagggttagtgaggatatgaatagacaggcattctcatgtagagttgcgctaaatttccagtgcaggctctgtatctcaagtttctcctaaggcaagctggtgcaacatgctcactatagggccttgcacaggaagggttgcagtaagatatgctggatgaaggtaaaagtgcaaattacagaaaagcatataaaggaagatcctgggctgggcacggcagctcacatctataattccagagcttttgagaggccgaagtgggatgatcccttgagcccaggaatttgagaccagcccaggcaacaaagtaagaccctgtctctataaaaaatttaaaaattagccaggtgtggtggtgcatgcctgtagtcccagctactgagaaggctaaggtgggaagactgcctgagcccaggaggtcaaggctccagtgagccatgactgcataactgtactctagactgggtaacacagtgagaccctgactccaaaaaaagaaaaaaaaatgatcctaatataaactgtataaatttctatctttatgtgtatatacataatgtgtatatacataatgacagatgtctagattgagcatcaactaaattttaactactagtactgctgatgatttcatttaaaaattttttcttctcttgattaattttctgtatttgaattttttcccttaaaaagggcatgtgtcattttagattactaaaataactaaaattaaaaggtttgtctatctgttaaatacagttaaaccaaaagccttaattgaattattaagtaaaatatacttaaaatataataatataaatacattttttaaaacaaagtttctccaaataaagtaaaaactttattttatttttatttttttgagatggagtctcactctgtctcccaggctggttggtgtgcggtagtaagatctccgctcactgcaacttccatatcccaggttcaagtgattctcctgcctcagccgcccagagtagctgggactacaggtgcgcaccaccacgcccggctaatttttttatgtttttagtagagatgtgttttcaccatgttggccaggctggtctcaaactcctgacctcaagtgatccgcccatcttggtctcccaaagtgctgggattacaggtgtgagccacagcgcctggccgaaataaagtaaaaactttaattcttgggctaaatttgaatatggaaaagtccccacgttggagatatagtaccaattctgtgggcctgcagttaagatcagaattcaatctagctttcgagaaagaaaggaaaagcttctttcatcctttaccagttttctagccgatctaggcagatgttgggcgggcctccaatgcaggcaatctgttgccgcctcttccagtcagccagctcctcgtccgtgagagttttctgcacgtactccatcgctgacaaaagccccgccagctcactcacgatgctctggttggaaaccaaaacaaagtcagaaaacatttcctcagactgtctctaaccacattctttagtcaactccagagcaggaacttcttagaaaccaagcaagttctgccacaagacgctgaaatcccgcaagtgagcgagacacatgggggaagtggtccgacctatgcccttactctccgcatctggtccagcgcagtgagcatctgttccagctgctgcatcttctgcctggtcactgactggttgtttccattcagatcttgcatgtctgcgaaggaagaaaaaactccttgacctgagggaatactccttgacctgagggaatactccttgacctgagggaatactcctggacctgagggaatactcctggacctgagggaatactcctggacctgagggaatactccttgacctgagggaatactcctggacctgagggaatactcctggacctgagggaatactcctggacctgagggaatactcctggacctgagggaatactcctggacctgagggaatactcctggacctgagggaatactcctggacctgagggaatactcctggacctgagggaatactccttgacctgagggaatactcctggacctgagggaatactcctggacctgagggaatactcctggacctgagggaatactccttgacctgagggaatactcctggacctgagggaatactcctggacctgagggaatactcctggacctgagggaatactcctggacctgagggaatactcctggacctgagggaatactccttgacctgagggaatactcctggacctgagggaatactcctggacctgagggaatactcctggacctgagggaatactcctggacctgagggaatactcctggacctgagggaatactccttgacctgagggaatactccttgacctgagggaatactcctggacctgagggaatactcctggacctgagggaatactcctgtccttaatgaccaggctcctttgaggacccgtacctcccttgcgccccgcccgccttaagatctaaacagagttaagacaaatgagtctttcaactcaacaacacaaactcactttctagagattttaacatctctaatattcacttgcctccttgactcttgagggttttatagttgaaatcaaagtcatcctggagattctctaccactttcattttctgttctagatcctgtttaaaataagcaaacaaaaaaacagaagtaaagaaagatttccttgggaacagaaaatataaagtttctgaggagaattcaaatgaagccaaaacctcaaaaaagatacatgcaggacctgcaggcagtatccccaagagaaggctccctgttggccaggtgcagtggctcacgcctgtaatgccagcactttgagaggctgagttgggaggatcacttgagcccaggagttcatgatcagcctggacaacacagggagacccccatctctacaaattttttttttttaattagctgggcgtggtggtgcatgcctgtggtcccggctacttgggaggatgaggtaggaggatcgcttgggcctgagaggtcgaggctgcagtgagctgtgatcatgccactgcagcccagcctgagtggcagagcaagaccctgtctcaaaaaaaaaaaaaaaaattaatgaaagctccctgcccgaggcttgtaacttgcatcacctgcactctcttccggacatcctgaaggtgctgctccagcatctgctgcttctccgtcaccacggctgctgtggggtggttggcctggcccccttgctgccaaaaaggaggtcaatgcacatgtgaacacagaactatggggagaggaatacctctacccagcttccatcccaccctaactacccttcttgtttggcttgagacgctgctgccatcacaagaggaagggaaacagaggcagtggtgctgtcactacacaggtgacactacacaggtcataccataaaccccctttatggcactaagagaccacatgttcagctaagacatggtctatgccttcaaaaacctcatgggcaagtatgtcaaaaaattcaaaacaatttatgacagcagatgttggatgtctacttaaacgtggtgtccagtatatttctgagggataataaaaaaaaagtcctgccctagggatgaaattccatattaaaagatattatcttggggagaaggggaggctggtaccttggaaaatgtcaaatagcacatggaaaaagaaaaagaagaaagaaggctggatgtagcagctcacacctataatatcagcacttgggaaggctgaagtgggaggactgcttgaggccaggagttcaaaactagcctagtcaacatagtgaggccccatctcgaatgaataaatgaatgaatgaattaaagaaataacaaaaaataaatagcatatgaaacttaaaaattacaggttcgtgccaggtgcggtggctgatgcctgtaatcccagcactttgggaggccaaggtgggcagattacctgaggtcaggagtttgagaccagcctgaccgacacggagaaacccatctctactaaaaatacaaagttagctgagcttggtggtgcatgcctgtaatcccagctactcgggaggctgaggaaggagaatcgcctgaacccgggaggtggaggttgtggtgagccaagactgcgccatgcactccagcctgagcaacaaaagtgaaactccatctcaaaaaaaaaaaaaaaaaattacaggcttgggctaggcatggtagctcccacctataatcctagcactttgggaaaccaaggcaggaggatcacttgaggctgggagtttgagaccggcccagggaacatagaaagagacctcatctcaaccaaaaaaaaaaaaaaatttttttttaactagctgggcatggtggcatatacctgtagttctagctacttgggaggctgaggtgggaggatcatttaagtccagaagtttgaggccacactacagccagttttatgggcaaccattctcttcctttcccatggtccctatccaagcccacagaatacaaacttcttagaagttttgggaaggtgacccatgcccctacttcttcccacagtgacagtgactcatctgattggtaagatggagagaaagactctgtgtacacacagatcttcaaagaacccagcacctaagctggtgcctccctcctctcactcttgccttcctagggcccaccataagcaagagcagcagcctggtttctagaagcaggtctagaggcctatccctctgccttgttggtctatggcagctgaagctccatatggatggctggggtggggtgggggtgctgctctgcacatccagtctctctaccccaagatctaactcagggcacaggcattggaaagcccctatggttaccagctcaagccacactttccattctagttttaccaacaatacagctgatgttttaaccttcattcctttctcatgtctatttctcaagcaggactacacttaaagggagaaaacatgattaacgatcacccacagaaacccacctctaataccttcgtaaaaaactgtattggctccccactgcttccagctataaacatctcaggccaacacagaaagctgtttcacacaattgataacttcaactttccctccctgtgccttggtcaccccagactcccaactcttccctgcatgcagtgtgtttccacactctcttcccacccgctatccactcagcatggcctgggcttcagcccaaacacacctgaactcactcaccttcaaattcagttcaaatgtttcttttcctgagaaatcttattcaacttccttagacaaaatgacacacatccttttctgtgtttttctcactttgagtgtttgtgtacttataatcccaactagcctgacagcccttggtagcagggattacatccactcttctatctttaaccaattctagacacttaagagcatgccaggtattgtaaacagaaaaaatagcagtgaggcctgggttgaggccacaaataaccaacttatagctttatatcaggggttgcaaactttttctctaagggacagagggtaaatatttttggtttcctgggtcatacagtccctgccacaaatagccctgccactgcagcaccaaagcagccacagataatgcataaataaatgagtgtggctgggttccgaaaaaacctcatttacaaaaacaagcagcaggctggatttgggccacgctcacagtttgcagacccctaatccgtacgattgaaaacatccttgggataactttggctttcctacctcccatggtaagttggagcctctatccaaattgacttaaaccacttatttttatcttgtggagcaggataaaatacaaaggttttccacagcagaaaatcctagtgctgcctgagcaaatgcctgtgtgctaacctcttgggctacagggcactgcacagtaagtgttacctaccacctcgctcacacctgagcatatcagttttctgcttaaaattcctcactagggccggacacagtggcttatgcctgtaatcccagcactttgggaggccgaggtggatggatcacctgaggtcaggagtttgagaccagcctggccaatatggtgaaaccctatctcactaaaaatacaaaaaattagcccagtgtggtggctcatgcctgtaatcccagctacttgggaagctgagacatgagaatcgcttgaacctgagaggcagaggttgcagtgggccgaaatcgcgtcactgcactccggcctgggtgacagagtgagactctgtctcaaaagaaaaaaaaaaaattcttcactgggtccccatttcctacagtaatggtgagggtgatgatagtgatgtcagcagcagcagaaagcagttaaattattttgcatttatgtgtcagatactgttctaagcattttacatgtatgaattaattctatgaagaaggtattgttatcactcccattggaggaacagagagagtaaaaattgtttacttaaggttacagagcaagtggcagggctgcgggttcaaaccgaagcagttggccccttgtggtaaactgctcttccagggccccactgttaggcatgactaattaaaacatcatgtggccttgactagcttgtcttccccgacccaatcagatgctgaactttctacacttctcccaagaatacacatttctgtttctgtctttgaacatgatcttctttctgcctggagagctctttctcatcagttgatgagcccaggagttcaacaccagcctgggaaacatggcaagagcccatctctaccaaaaaaaaaaaaaaaaaaaattagctgggcatggtggcatgtgcctgtagtcccagctactcataaggctgaggcaggaggatcgctagggcccaggtggttgaggctgcagtgagctgtgatcacaccactgcactccagcctgggtgacagagtgagactgtctcaaaaaaaaaaaaaaaaaacaaaggttacaaaggtaaatttgaaatgtaatgttatgtgtatttcaccacaattttttaaaaagcagggggtcacggagaaaaagaaaaaatgtccctgattataggatattaaagacggtaaaacccctcacagaaagtaaaaaagtctcctatgaccgactactttaatgatttagtatatgtgtttccagatattttcccatacataccaatagtatatgcaaattgcatacatttagttttactactatgaatcagatctttctttttttttttttttttttttcagtcggagtctcgctctgtcgcccaggagtgcagtggcgcaatcttggttcactacaacctccgcctcccaggttcaagcgattctcctgccccagcttcccgagtagctgggactacaggcgcgtaccaccacacccagctaatttttgtatttttagtagagatggggtttcatcatgttggccaggatggtctcaatctcttgacctcatgatctgcccaccttggcctcccaaagtgcttggattacaggcgtgagacatcgtgcctggcccagatctttactttcattacatcttctaacaggttactgctgctactgattaggggaactgcagattctaaaaatatttatcttgtatacaatggcctttctaaaccttgctagttccaattgttattgttagttttgtttctcttggatcttcgaggaagacctatctatctgtaaataataagagttctgtcccttgctttccaatatttgtaccctcatttctttttctttttgcataggctggatccctcagaaaagtatcaatggtaaaagacatccttatcttttgctgtttttactgagaatagtgtttcaccactgtgcatcatgctccctttggtttctgataaatattctttcttgtgtttagaaagatccttaattaagccaggtgcggttgctcacgcctgtaatcccagcactttgggaggccgaggcgggcggatcacgaggtcaagagatcgagaccatcctggctaacacagtgaaaccccatctctactaaaaacacaaaaaattagctgggtgtggtggcgcgcgcctgtagtcccagctacttgggaggctgaggcaggggaatagcttgaacctgggaggcagaagttgcagtgagctgagatcacgccactgcactccagcctggcaacagagcaagactctgtctcaaaaaaaaaaaaaaggctgggcgtggtggctcatgcctataatcccagcactttgggaggctgtggccggtggatcatgaagtcaggagatcaagaccatcctgcctaacaaggtgaaaccccatctctactaaaaaaaatacaaaaaattagccaggcttggtggcacacacctgtagtcccagctagtcgggaggctgaggcaagagaatcgcttgaacctgggaggcggaggttgcagtgagctaagatggcaccactgcactccagcctggacgacagagagagactctgtctcaaaaaaaaaaaaaaagagagatgaggtctcgctacattgccccagctggtctcgaactcctgaggctcaggcaatctgcccgtctcagcctcccaaagtgctgggattacaggcgtgagctactacacctggctgttttttaggttttgatatgaggatttttccagcctcataaaataagctgaaaacatcccttgttttcctatactttggaaaagtttgaatgatattggaataatctgtactatgaaagtttgtcagaacaggccgggcacagtggctcacgcctgtaatcccagcactgtgggaggctgaggcgggcggatcacctgaggtcaggagttcgagaccagcctgaccaacatgaagaaaccccgtctctactaaaaatacaaaattagctgggtgtggtggcacacgcctataatcccagctactcttgaggctgaggcaggagaatcacttgaaccctggaggtggaggttgcagtgagccaagatcgcgccattgcactctagcctgggtaacaagagcaaaactctgtctcagaaaaaaaaaaaaagaaaaacaaagaaaatttgtcagaacaaaacaaaacttttaaaccattgggtctgttggattcttttggtggaactttcttttttttagagtttttcaatgtattttggggggtggaactttctttttttttagagtttttcaatgtatttttatgattattgatctatttaatttcttttccttcttttttagtagatctaataatttatctcattataaagttgtttgattttccattcctcccagaccagggatttgttttgtctcaggtctcacctgggccgcagtggctgcagtctgtagaaggcgtgattcttcccacaggcaccgggccacaatccgggcaatctccattggcttctcaagatacctgctctataagtaggagagaaagagaataaaaatcagcagcagaccatggagatgtggactgaactgtggcaccttaaaactaatgtattcatcaaggaaagcatttattctaggaaacaacggaacaaaggcttcagagcctgggtgaaggctctctgtcggcggggggcgaaggggaggtcgttactatttctgtaacagaaggcacattagcctgagtcttttttttttttttttgagactggctctcactctgtccgccaggctggagtgcagtggcgcaatcacggcttattgcagcttcgacctcccaggctcaaacaattttctcacctcagccttctgagtagctgggactacaggtgcatgccaccacaatcagctagtttttaaaaaaaatttctgtagagatggtgtcttgttatgttgcccaagctggtctcaaaactcccaggctcaagcaatcctcccacctcaacctcctaaggtgttgggattacaggcgtgagccaccatgcctggccttgtctgagtctttacacagtatactatcctggtcttgcagggaagctactgacttagtcaagaagtatcccattatggtcaaacatttaacatgtaacagtgagagtcatcttcctatcagtggaccgcgttaacatgctaacatgtatgattaacataacaatcactttattacttcaactgtgacaagagaagtgattctcaggtaatgatgctcacgggtaagtatacagagctttgagaaagggctaattacttctcctgtgattgaaaatacaagatagattctcgttacttagccaaatgagaaaagagatgcttccaggaaagaacactaacacccgactctgcgggtcctgtttctccttgtcctcagtttctcatcatacctgaagaaactgcttgattcttcgtagattgtgctgatagagaacattcgactcttgcaggaagcggctatactgctggtcaatctctcccaggagattatgaaacaccaaagtggcatgtgattctttgctggccgcatatgccctaggaaaaggaagaatgataaagaatggctctgaagccgacgcatacacacaaacacagaaatcaccatcaagaaagaggaaaaaaacaaaaaaacaaagcaaacctgatgctataacccattcatcatgttagattcttcttgctcagcaataaaatgccatcaatgtaataattattaacaattattccaggccaggcatggtggctcatgcctgtaatcccagcactttgggaggctgaggcaggcggatcacctgaggtcaggagttccagaccaacctggccaacatggtgaaacgctgtctctactaaaaataaaaaattagccaggtgtggtggtgggcacctgtaatcccagctactcgggaggctgaggcgggagaatcgcttgaatccaagaggcagaggtgcagtgagccgagactgtaccactgcactccagcctgggctacagccagactccatctcaaaaaaaaaaaaaaaaaaaccacaaaacaaaaaaacaattattccagatattattacccactctcataatctgttgtatttgtaaaatatttgagcaaagtagacagatatgctgttttgctttaaaccctcaattaactctggtcagatttattagtacaaataagtaatcccaggctgggatggcctatctccaacatctgtgaatcacctcctggcccttcaccaaatcagagtatgcattctggaaaaaccaggtcatattaacactggcctgaattaaaccaaaatcagtagtgagcctgagcatattaaagtgaagaaaatagttgctggacatctgtgccattatctgctctatgaatggaatctacttcccttatcctgtgatctagtttggatctacatccctgcccaaatctcatactgaaatgtaacccccactgtttgaggtggggcctggtggaaggtgactggatcatgggggtgggtttctcatgaatggtttaataccatccctgttgatactgtcctcgagacagtgagttcttgtgagatctgatagtttaaaagtgtgtggcacctcccccttgctctcttgctcttgctgtggccatgtgacctgcctgctccctctctgccttccgccatgattggaagcttgctgaggcctccccagcagcagatgctgctatgcttcctatatagcctgcagaactatgagccgattaaacctcttttcttataaattacccagtctcaggtatttctttatagcaaattgagaacagactaatacacccctgtggctccttcctttaactaaaggggaattacaagtatcaacccaaagttctagctatgacagaattcacattcagagaaaaaatatgtctaccacatcactggattatcagaatatatagaggatctgcccaagtaaatgaggtccaaatcaaccttcaagacatccaccaccatacaggcggtttcaatgtgtcaaagacagttgcccacatgcccttctaagataaaaaaggctttacaagaccaaagggtgcccctttatctcctgatctcattttccccatcacctgtacccatacattttttaatggaacagcaaggcatgacattaagagttcatgtctcttgactcaaactgaaacctaacaatttggagagtcacttaagaaggacttaccaatcttgactctcaatccaaggggccagaaactgccgcagctccattgggaagctgtcactgtagagctgatggagctgctccaggtaccgtgtgtcaagctgctgtagctgattccattgggccatcctgctaaaatcaggggtcccaactgtaaaccaaagtgtgcatatgttcaccacaagtcccagtaggggtaaacaatctagaagtagccattgcccaacacaggtgtcaggtctgtgactagggataaagatgctctggggaggaccctgcttctttctcccagtttattttatttttaaaaaatagagatggggtctctattttttgcctgttgcccagggtggccttgaactcctggactcaagtgatcctcccaccttggcctcccaaagtgctgagattacaggcataagccaacacacccagcctgtttctcccagtttagaacaatacaaacacattcacaatccccaccttgggataatcacagctcctttttattattttttgaagacagagtcttgctctgtggcccaggctagagtgcaatggcatgatcatgggctcaagagatcctcccacctcagcctcccgaggagctgggactataggcacacaacaccatgccacactcattttttaaaaaatgtttcgtgagacaaacaaaacatgcccaggctggtcttgaactcctgggctcaagtcatcctcctgcctcggcttcccaaagtgctgggattacatatgtgagccaccccatctggccacacatctcttttacactgggatgacaagtggctattatgccaggttctagaatccattatctaccagaagtgtgtgaaattaaaaaattacttaactcccagatttctattcccttgtctataaaatagagataataattcccactcctcagaggtattgagatattcctacagcatccagctcagtgcatggcacataacagatgcccaacaaatgtcggttcctttctttctcctccacagcccttttagttatacacagtaaacctgtactgtagccaaaatgtagaaattggatgtttggggttgggggacagagcactaattccaagactacaggtttaaaagtataaatgaggatccaggaagatctgcctgagattctcctactcaacaaataataactattttaaaaattgcttagtctgggacaacagagaaggaaagaaaaatgccaggcataaaagttgtcccaggttcaggaacatcccagtgaaatgctctggtatgagaaacccagccagctaattacctgtaatcctctttctgaatagcatgggtcatggaaatatcaatagaggccaagttgttttaacaagttctaaaattaggccaggcgcagtggcttacgcctgtaatcccagcactttgggaggccaaggcgggcagatcacctgaggtcgggagtttgagaccagcctgaccaacttggagaaaccctgtctctactaaaaacacaaaattagccaggcgtggtggcacatgcctgtaattacagctactcaagaggttgaggcaggagaattgcttgaacctggaaggcagaggttgaggtgagctgagatcgtgccactgcattccagtctggcaactagagcaaaactctgtctccaaaaaaaaaaaaagagaagttctaaaaataattacaagtcagagccaaagatgaaggtatgtacagaccaaggtccaatgagatggttctctgggatagtgagaacatttaatgagagactgaacacacgcaaacatactagagttcttgattctcagagaaggcacgaagaagcacctagttagcactggctttttcataaaaatgactgagcaaactggcaacaaaaccagcaggtcttctgttctcaaggcagcaaatgtaacggaatgaaaggtgcgatcgtggaacctctaactcctgcaacctctaactcctgggctcaggcaatcctcctacctcagcctcccaagcagctgggagtacaggcagcattgctgcacctggctaatttttttaaaaaaatttttgtagagatagggtcttcactgtgttgcccaggctggtctcgaactcctgggcttaagcaatcctcctgcctcaacctcccaaagtgctgggattacaggcgtaagctaccacgcctggcctgggatcaggttttctgacagaacctgagagggctgcacttctccctccctctttgggggacagactcagaatacccctcttgctactgtgaagacggctggtggagctctcaagcatatattcagggaagtgcaggtagtacctcccagcagtctttacattgaataattaataatctaaggcagcagcatccaacagaaatagaatacaggccacacatgcattttaaattttctggtagccatacttaaaaagttaaaagaggctgggtgcagtggctcacgcctgtaatcccagaactttgggaggccaaggcaggcggatcatgaggtcaggagatcgagaccatcctggccaatatggtgaaaccccgtctctactaaaaatacaaaaattagctgggtgtggtggcacatgcctttaatcccagctactagggaggctgaggcagaagaatcgcttgaacccaggaggaggaggttgcagtgagccgagatcgtgccactgcactccagcctgatgacatagcgagactccatctcaaaaaaaaaaaaaaaaaagaaaagaaaagaaacaggtgaaattaattttaatgtattttatttcatttaatatatccaaaatgttattgcaacatatgaacatacaaaacatattattatttatttatttattttttggagacaggcactctgtcacccaggctggagtgcagtggttcaatcacagctcactgtagcctcaacttcccagctcaaacgatcctcccacctcagcctctcaagtaactgggactacagatgcgcaccacatctggctgattatttttgtagagacggggtcctactgtgttgcccaggctggtctcaaactcctagactcatgcatctcagcctcccaatgtgccaagagtataggcttgagccaccgtgtccagcccacaaaaactattaatgagatactttacactcttttttttgctacgaagttttctaaatctcctgtgtactttacatgtgcagcacagctccaaggtattttccctcctcatgtatcaagggcttaaattccactggtgaaaaagctcagtaaagcaaatagagagaatgtcagaataaggtatttgccccaattaggccaatacgcttctataaattaactaaatattccaacaatgttattttgttgttattgtttttgagatggaatcgcctaggctggagtgcagtggtgcaatctcacctcactgcaacttcagtctcccgggttcaagcgattttcctgcctcagcctcccaagtagctgggattataggcacgcaccaccatgcccagctaatttttttttttgtattttttagtagacagggttttaccatgttgcctaggctggtcttgaactcttatcagttcaagaccagtctggccaacacagtgagatcctgcttataattaattaatttaaaaatgtaggctgggcacggtggctcacacctgtaatcccagaactttgggaggccgaggcgggtggatcacgaggtcaggagttcgagaccagcctggccaacatagtgaaaccccgtctctactaaaaatacaaaaattagccgagcatggtggtggccgtctgtaatcccagctactcaggaggctgaggcaggagaatcacttgaacccgggaggtggaggttgtagtgagccgagatcgcaccactgcactccagcctgggcaatacagcaagactccctctcaaaaaaaagcaatgttacttgccaccttccaccctaagattcacctgccacaggacaaatgctgcctgggcagtggtacaggtacactaagcactagccagagtaaaagcagtggctgacgtgcatactatatgctgaagcattgtaaccatggcatgtattgattgccctctgtaagaaatcaaaggccattagatctctcttacaatatttgcattagggccaagttaaaatctgcctcacatggaggttgcagtgagccaagattgtgcatctacactccagcctgggtgaccaagtgagactctgtctcaaaaaaaaaaaaaaaaaaatctgcctcatagactaaaagcatcatgacctgacttatgctatgcaagaactgatgtgcatacaaagaaatctgcataatatgccaatttatgtagattctattgcatacaaatttactgaaactctaaacctacacagtccagtatggagtcactagccacatgtggctactgagcacttgaaatgtggctgcttcaaactgaactatgctgtcaatataaaatacacactggattttgaggacttagtgaaaaacaaaagaatgtaaagtatcttgttcatgttgaaatgataatattttagatatattgggttaaataaaatatattattaaaattaacttcacccatttctttttacttcttttaatatggctactagaaaacttaacattggtagggcatggtggctcatgcctgtaatcccagcacttagggaggccaaagcatgtggatcacccgaggtcaggagtttgagaccagactggccaacatggcaaagctccatctctactaaaaatacaaaaattagctgggtatggtggcacatgcctgtagtcccagctactcgggaggctgaggcaggagaattgcttgaacccgggaggcggaggttgcagtgggccgagatcgtgccactgcactccagcctgggcaacagagtgagactgcatatcaaaaaaaaaaaaaagaaagaaagaaagaaagaagagaaaagaaaagaaaagaaaaagaaactaaaagaaaacttaacattacatatgtgacttggatcttatttttattgaacactgctactctagacaatgtagccaaaaagcggtggttctcctaaaaaaaaatgatttaaaaaaagaaccaactgctttttgtaataaactccagtgtttaaaattaattttaaaaacagactttattttttgagacagggtctctctctgtcacccaggctggagtgcagtggcaaatatagatcactgtaacctccaactcctgggctcaagcaatcctcctaactcagggacctgagtagctgggactaggggcacaagccacaatgttcagctaattttttgtagtttttgtagagacaaggtctcattttgttgcccagactgatcttgaactcctggcctcaagcgatcctcccacctcagcctcccaaagtgctgggactgcaggcatgaggcatcatgcccagccaaaaatagactatttaattatttgtcttggatacaaatgcagaggcatcacagtctactccctgaaggtccaaattaaatcatgaaacagcatcccactatacctgctccatcatagattaacactggggtcatgcatgaatatttgcattttcaaactaacatatcctaaaaacgtgtaagttattgaaaattatctaattcatttccagtacataactaaggattttttggttgttgctgttcttatttttagctggggacagaggagggctagtaagtagtacaataattgtgttcttttttttttttttttttttgagatgaaatactgtcacccgggctggtgtgcagtggggcgatcttggctcactgcagcctccacctcccaggttcaagcgattctcctgcctcagcctcccgagtagctgggactacaggcatgccccaccacgcccggctaatttttgtatttttagtagagacggggtttcactatgttggccaggctggtctcaaactcctgacctcgtgatccgcccgcctcggcctcccaaactgctgggagtacaagcgcaagtcatggcacccggcctgtgttatttcttaaaacagaaaccagctagtagttttttccataaaattaaagcaccaggctgggcacagtggctaacacctataatcccagcactttgggaggctgaggtgggcggatcacaaggtcaggagtttgagaccagcctagccaatatagtgaaaccctgtctctactaaaaattcaaaaattagccaggcgtggtggtgggcgcctgtagtctcagctacttgggaggctgaggcaggagaatcgcttgaacctgggaggcagaggttgcagtgagccaagatcgtgccattgcactccagcctgggcaacagagtgagactctgtctcaaaaaaaaaaaaaagaaggcaccagggcaccaacaatgactgatttcatgttttacttcttagtctaatcaccataggtaatactttaatagttattctacaggggaaaataaaagtataacttaaagccaaagaccaggtagtattttcaaggagagaatatgcaaatacttccatagtcttctccttacaggctgcttagctacaaaccatatttaattaacagcagtcacaggagatgactagccaaagtgtctaggaaaatcactgccaagcagctttactgtaactgttttactggaaaagacctcaaagagcccatgttatttcacaatttcaattttggtttttcaaattacaagttaatctaaagaactccactaagttctaactacattacttcatatctacggaataattctaagcctgtgggtttttaaaaaaattttattagacattctagaattgggcaacacttcattcaatgccataggatgaatgttctccccaagcctgtgacttaataactacttcattgagccccagaacacacaaagttatctgaggaacaacttgagtgccaactaccactctgggtgcataagagagaagacaattcattactccatataggctgccttaggacattatatggggctcaattcaaagcatttactcaggttaagtcagcagatagtagatgcactgtacaaaggcaaggtgggtgtaatcctgttttctataactgaagagaaaagaaaaaaatgaaacagcaagtcatcaaagactttttggacttttcaaaacaggaatttctcagtcccttggggataacctaccaacagcaagtcataaaacaaataactattgtctaattgggaacttattaccgtaaagatgactgaaaaagtctgtccaaagttacagttctcatttatatacttgaatctaatgaaaccaaaagatatattgagaaacgcagtcaagaccacttacaaaagggatttactacacagcttcataaaactttttaaagttaagacttgtacttcacatccatgcactagtggatttacaacgagggtgagggaaggcggaaagagagacgaaaatcaggctcatacaataatccagaacagaaagtgatctaaagataacttctgttccactttgcaatgtgtcatgacattttcctttgggtaccacctatacttttattataaatacatgcattttaaatagagcatacctgtgttttatctgctgcctacactaacctcttctttgctgtcaggaaaggcccagtgatcaaggcaaccaaagtataaagaaacacagaagatttcttgcactgaattctataggaaccagtccttttaagagatatgtttgaaagattataaaataatgttcaatgtggaaaatttagaaaaatataaaaaagaaaataaaagataaaaacatccatatcccaccatcccactatgcagaacaaaaactgacatgttgccaggtgtggtggtctgtgaccccagcactttgggaggctgaggggggaggatcacttgaggccaggaagtcaaggctgcagtgagctgtgattgcaccactgtactccagcttgggtgacacagcgagaccctgtctccgaaaaaataaaaattgacatgttgatgtaattcctttaaatctatttcagaatgtgtttgtgtgtgtgtatatatatatatatatttttttttttttacattggagtcatagcattaatacagctgcatattcttttaaagtttattgtgtagtaaacatttttctatgaaaagagtattgtgtttgtttgtttgtttgttcaaatagagaccagctgcccaagctggtctcaaactcctggtctcaagcgaccctcctgttttggcctcccaaagtgctgggattacaggcgtgagccacagtacctggcctgaaaagagatgttttgttattgttgttgttgttgtttgagacagaatctcactctgttgcccaggctagagtgcagtggcaccatctcagctcactgcaacctccatctcctgagttcaagtgattctcatgcctcagcctctggagtagctgggattacaggcatgcgccatcatacccggctaatttttgtatttttagtagagacggcgcttcaccatgttggccaggcttgtcttaaactcctgacctgaggtgatctgcctgcctcagcctcccagggtgctgggattacaggtgtgagccactgcgcctggcctgaaaagaaatttttatttaaagcgcataaaagaactattttgtttctattggtgttttcaatacaaccctgctaatcccactgagggccacataatttattaagatttggaaaccccaatttatttgttctcaccataccacgttctaaaaataatctgaagtatctgcaagtagattaggaaggaaaaaaatgagaaaagtaagagaaagcaattcacgctagagaaaaacattcaatcttcataaaattttcaccacaggataaacagcataatggatgacagagagtccacattaaaatactgtaggccaggtgtggtggctcatgcttgtaatccttgggaggctgaggagggtaggtcacctgaggtcaggagttcgagaccagccaggctaacatggcaaaagcctgtctctactaaaaatacaaaaattagccaggcatggtgaaatacacctgtaatcccagccacttgggaggctgaggcaggagaatcacttgaacccgcgaggcagaggttgcagtgaaccaagatggtgccactacactccagcctgggcgacaagagcgaaactccatctcaaaaaataaattaaataaataaataaataaatactgtagctttaaactattagagtcattcataatttaaccattcataattactctagacattaagaatggaatttcaagtttaaaacataactcaaaataagtacacttatatagtaagcacacaatttcatagttttaagtccaaatagtacctttgtaagatttaagactagatacttgcaataagaagtctatatataaatctagttttgatttcctaaagagacaaaatattaacacttgagtgcccaatctgaaacaaattactataattactgtaatgttcaattacatataacaggatttgctttaaaattaaaaaccaatgacgatcaagcttgtaaaaatgaacatcaatctataagaaaacttgagttatagttccctactaatatgacaaaatttgaatatatgaaagaagtaaaggccaggcatggtggctcatgcctataattctagcactttgagaggccaaggtggaagagggattgcttgagctcaggagttcaagaccagcctgggcaacaccgtgagaccttgcctctacaaaaaaatttttttaaaattagcctagcatggtggcccatgcttgtagtcccatggaggctgaggcaggaggatcacttgagcagattgagactgcagtgagctgtgatcataccactgcgctccagcctgggtgacagagctagaccccatctctaaagaaggagcaagagcttaacaaacctaattccctctaaattaaaagtaacaaacatgatttgtcaattactgagtgcacagttgattgttaaagctgcctaagaacaggtctgagctctacaaaaactaaaactaaaacaagaaaacccacaaaacagaccaaatttgtgcatcagatgacctccccacttgggaacacttccacttccccaaccagacacattcctctgtatcagtgtggtgtgggggaaaggacagtagagacgggagctggatgggcctgggtgcaaaaccctgcctgacatttattagctatttgtctttgggaatggtatttcactaccaaatgggctttctcttcagtaaaacagggaactctctctcctttgaagaactgttgtaaagttaaaatcaataatggttgtacagcatccctctgtgctggtgctgctggtgccagatcctcagagctgcagttattgttcctttcccccagggtctccctttcatggacatttcttactttttttttttttttttttgagatgtagtctcactctgttgcccaggctggaatgcggtgggcacaatctcagctcactgcaagctctgcctcctgggttcacaccattctcttgcctcagcctcccgagtagctgggactccaggcgcccgccaccacacccggctaattttttgtatttttagtaaagagggggtttcatcgtgttagccaggatgatctcaatcacctgacctcgtgatctgcccacctcggcctcccaaagtgctgggattacaggcgtaaagccaccgcacccagccagatatttcttatcttaaacccatttccttagtgtcctggaaagcaggttaatccatcagattcactaggggttaagtgtgataatcactaatcagctttccctgctaagtaaaatacatgcatttcaatgcacactcttatcatatcgggagggaaggagtcagtgatgctgtgatttggcatgttaatttaaggagagaagggaggtcaggagagctgggtggtgacctgatcaaatatctccatacgtatttcacctaggatggctctaggtcctaaaaagagtaaaaggtgaaaacactaagtgatattcaaaacaaaagaaaaagatgaaaaataagaaccttggttaaagagcagtcgaaataagtaatgattatagctatgatttatatagcactttttacaagaagccaggcgctgttttaaacacttgacatacttatttgctcatttcataattgtaacaaccctatcagataggtactatttttatcccactttacagaggagaaactgaggcacagaattttaagtgatttggccgggtgcggtggctcacgcctgtaatcccaacactttgagaggctgaggcgggtggatcacgaggacaggagatcgagaccatcctggctaacacggtgaaaccccgtctctactaaaaatacaaaaaattagccaggtgtagtggcgggcacctgcagtcccagctacttgggaggctgaggcaggagaatggtgtgaacctgggaggcagagcttgcagtgagccgagatcgcgccactgcactccagcctgggcggcagagcaagactccgtctcaaaaaaaaaaaaaaaaaaaaaagatttttaagtgatttatccaaagtcacaacacaggtagtaaaggcatggagctggaatcataacgcacagtctgttttcggaatgtctgttcttcaccactataggagtcttgttttttcttttttttaaattagagatggcgtctggccatcttgcccaggctggtctcgaactcctaggctcaagcgatcctccagcctcagcctccaaaagtgctgggattacagatgtgacccaccgtacccagctactacaggagtattagaaagtgggaattttggccaggctcagtggctcacgcctgtaatcccagcactttgggaggctgaggcaggtggatcacctgaggtcgggagttcgagaccagcctgaccaacatggaaaaacctcatctctactaaaaatacagaattagctggccatggtggcacatgcctgtaatcccagctactcaggaggctaaggcaggggaattgcttgaacctgggaggcagaggtggcagtgagccaagattgtgtcattgcattccagcctaggcaacaagagcaaaactccatctcaaaaaaaaaaaaagaattttagttgatttttaagtaacccacaaaccaaccattgtaactagccaatgtgatcttatggtattttaatagacatactagtacttggattttgaaggatctagtagtctagctgtaacagacccacatctggatgctattctaattctgtgtatcaaaattgaaatggaacactaaaacaaccaaacacatccagggagggacaaccagggtgtgaggagttgaagaccttgaatattttgctcagcaagaagatgcaggcaacaggagtgaggttaggagagaaaaacatgaattacagaagagtggcccctcaaatacctggaaatctgtacgagaaaggataaatcactctaggactagaacctgtctcctcacaacatcttctcccaaattcttccccatgaagtaatacagaggtctccaccctggctgacactaaaaaatatatacagcaagaaagatgcctgggaaccaaaccagtgccaaattggaacctctgacagtgggaccaggtttcaaatttcgaaagctacggctgggcacggtggctcacacctgtaatcccagcactctggggggcctaggtgggtggatcagctgacgtcaggagttcaaaaccagcctgaccaacactgtgaaagcccacctctactaaaaaatacaaaaacattagcaggcatggtggtggatgcctgtaatttcagctacttgggaggctgaggcaggagaatctcttgaacccgggaggcggaggttgcagtgagctgagatcacgccattgcactccagcctgggcaacaagagcaaaactctgtcaaaaaaaaaaaaaaattcctcagatgatgctaaagtgaggccaaagaataataataaattttttcgtgatcattaataaatataacgagaacctcgaaatcagagcagagatcagggctcaactctgaatacgcctcagaatctcctgaggagctctacaaagccaggtgccagttcttagcccagaactagcaaataataatctccagggttctaatgaagcagtacactgtagagactgtacaaggagaccacggcagaagaggaggctggagaaggctctcctgtcaagatatctgcactttcttccaagggcaatggggtaagtctttgaaaagctttaaacagacaagtgatagtttgatttacatttcaaaaagatccctcaggctgcaataatcctggtgggaggtcgtggctgcccaatttaggtagcagcattgtaagtgttttgaggcagacatccatcttctgtgacattacagagctacatgtgatgggacttggtgactgactgaagggcaaaggtgactcagagaaagggaggagtaagtgacaacctcccaggttcctgtggcatttggtattcagatggcggtcacatgctcagcatggtaaatgtcatggcaggagtgccaacattgagagggcaattgggccacacagtctctaaaaactgtttgttctataaattactgtcaagctcgattccctcaagacattacagccacagcaactcaaaataatactgtaggaaaagcaagtagatatttaaccaaaaagggttcagggtttgtactccagctgaatggtaaaacctgccatcccctcaggaaaagaggcagaggcaagagaaaaatcaggcagaaacatcagagccaaaatgcatagggggccatggcaagagctgttaactgtctcccaacatctgtgtgcttgcctccaggccattttccacactgtgggtagagagaccttttcaagacacaaacttgatcttgccacacccctacttaaaaccctcctgatgactgctctgttcttaggctaaaaaacaagatttgttatcttaaggcagaatagcatggatttgaatcctggttccaccacttcgatcacttagcgtgtagctggtgccagttatttatcctctttgtgccttaatttcctcatctatagaaaggggagagaacagtgcttacctcacagggttgctgtacaaattcatcgagctaatgaacacgtagcactcaggagcccaatagcgtgcagcatgtaagtgtttgtactcattactagcatgaccgacatcctggctggctctgcccctctcgtatggctggtaccagctggtggctaagttcctggcactcactctgctccttcttcaggtcctcaaaaacaccaggctcctgcctgccactggccctcacacatgccttccttctatcaccatcaccatgacttgcacccaagtactgtgactccattaacttggactcataaccactatgctggactgaaagccccatgaagacaagaagagtcttggcttttgctcactagcgtgtcctaccctgaaccctggcatccagcatagtgtctggctcataataggtgctgaaaaaataggtattgaatgaatgaacgactggagtgaattacaactaaagtgtgtagccaggttctcccaagtgaggacactgcgcccaattagaaaatattctgaggaataggccaactcttccagttttgctgtttgaaaaattcaagaatgatcaagaatcactgattcaagaataatccttcagtgattcttcaataagagtaaaatcacagcactccccagctcaaaaacacacactaacatctcattgtccaatgcaaaatctttacccttatctcaggctctgtaactactcagccaactttagccccttccagttcctctctccagcctacagatgactttcattttttgagacagggtcttgctctgttacccaggctggagtgcaataatacgatcacagctcactgcagcctcaacctcctgggctcaagcaaccctcccacctcagcctcctgagtaactgggattacaggcacatgccaccatgtctggataattttcttttttttttttttttggtagagactcagtctcaccatgttgcccaggatggtctcgaactcctgggctcaagttgtcctcctacctcggcctcccaaagtgctgcgattataggcatgagccatggcacccagcctccaggtgactttcataagtgttgtcttccttcaagtcaacttatctcctccttgccccccacccacagactttgttcctttttcatatttgttcttgcctaaaatgcttttttctctgggtggcgttatccatccctttcttgtgtctgtcagacaggctctccctaaccccacccctagtccaatgactgctttcactctgaatccccacggtacatatataagcatctgaggctctttcctattggctttgattctacctccttcacttgaggagcagctctctgctggcaaccacgtaccatcctgatttagaacttcccacaggctaacttaagacaccaaataaacacttgcacacacacataaccaccacctcccattacagaagtacacctcccctactgaacagatgatggccacgatactgaaaagcatggcatcaacatgacaactgcatcctgaaagatcagcctatatataggtttggttatcttgaatttcgagtttggagagaagcaaagtatttttctaataaactgtgaatgctgaggaattcaccttcataggagtcagaaacaggctgccaaacttttcaaaagaaaaacagtggtaggttgagcaagcacattgtcatgtcagattttccaggctcgagggccactgaagggagaagagcgagtagctggaaaaaacctgtgggtactgttatctttggccaaagctcaaataaaagaatcacaaaaacatccactgatctaaaatgctatgtaagtcattaatattcatctaagagaggcaactgaaataaagcagataaagagaacttaagccattctcttacctcagcctcccaagtagctgggattacaggtgcccgccaccacacctggctaatttttgtatttttcgtagagatggagtttcaccattttggccaggttggtctcaaactcctgacctcaagtgatctgcctgccttggcctcccaaagtgttggggttacaggcgtgagccactgcgcctggccaagaatttaaatttctgagtctcaaagtcataaacctataatatggctcaatgcttacctcagtgcttactggagagaaggaagattcttttctcaaatttattcaggtcactttccctatacgaaatactaaggtagtcctggtcacttacatggaacaatatacctggggctgacgatgcttggatatatagaagtccttcagtcaaaggaactatgaacttttgaggcagaacctcaaattcagaaggcatttgtggtggttggataacatggccctaaattctctcattatgccccactctctgagaggagggggtctttgttcccttcctttgaatctagctaagtccataactgttccaaccaatagagcatgctgaaagcggcgagatgtcatttccacctgatttcattggaagtctcattctccagaaccagccacattctgtgagaaacccaaggcaaaaggggaggccacaagtaggcacgtggtctacagtctcagctgaaatcagcctttgagtcatcgcagcccagacatcagatacaggagtaaagaaaattccagatgattattacccccagccgcttgagttttctcagtgagacctcagacatcgcagagcaaagacaagccatccctgctgttatctaaattcctgcccacggcatcttcgaacatagtcaaatgattgctgctttaggccactaagtctgagctggtttattgcattcggcaactagaacaacatttttactaacatagtgattgaatgtagacttaataatgaaagagtccaacttccataagaaaaaaattcataattttaaaggaagaggctttgctgttaaagttttttttttttgtttttttttgtttttttttttgagacggagtcttgctctgttgcccaggatggagtgcagtggcgtgatcttggctcactgcaacctccacctcccgggttgaagtgattctcctgcctcaacctcccaagtagctgggactacaggtgcccggtacaacgcctggctaatttttgtattttcagtagagacagggtttcaccatattggccaggctggtctcaaactcctgaccttttgatctgcccaccccagcctcccaaagtgctgggattacaggcatgagccaccgtgcccggcctgttaaagctattttaatagtaaacttattttctctatgcactcctttctaaattattcagccccactttctttcaaaacaacgtttatacactgacaattctcaaatttatgtctctagccccatccgctaatatgaacatcagacacttatagccaactgcctcttcaatatctccacctggatgtctaaaatgcatgtcaaacttaatgtatccaaagccaaccccttcattaaaaacctctcccagccggcttctcctccagtctcccccattctagcaagtgacaactccattcctgcacatgttgaggctaaaaaccttgaaatgagccttaacttcaactccagtctctctctctcttcctccccctcctcctgccacacctaatccattaacaaatcctgttggctctgtcttcaaaatctggaagtgaccgggcacaatggctcaggcctataatcccagcactttaggaggctgaggcgggtggatcacttgagctcaggagtttgagaccagcctaggcaacatggcaaaaccctgtctctacgaaatatacaaaaattagccggatatagtggcgcaagcctgtgatcccagctacttgggaggctgaggtgggggtatcacttgagcccaggaggcggaggttgtagtaagctgagattgcaccactgcactccagcctgggagacagagtaagatcctgtctcaaaaaaaaaaaaaaaaaaaaaaaaggaaggtgagcctttctcacaacctcccactgacgcagccttaatccaggccaccagcatctcttacctagatagctggactaggctaactggcctggatgctttcatccttgtccctctaccttctattctccacattacagatcctttcaaaataagagtcctggctggcacggtggctcaaacctgtcatcccagcactttgggaggccaaggcgagcagataaattaaggtcaggagttcgagaccagcctggccaacaaggtgaaatcccgtttctactaaaaatacaaaaattagccaggtgtagtggcaggcgcctgtaatctcagctactcgggaggctgaggcaggagaagttgcttgaaccggggaggcagaggttgcagtgagctgagatcgcgccactgcactccagcctgggtgacacagcgagactccgtctcaaaaaacataaacataaaaataaataaaaaataaaaataaaaacagaaattcgccggcatggtggcccaagcctgtaatcctagctactcgggaggctgaggcaggagcatagcttgaacccaggaagtagatgttgcaatgagccgagattgcgccactgcacttcagcctcggcaacagagcaagattttgtctccaaaaaaaaaaaaaaccagagtcagatcatttcattcccctgctcaaaacccactcaggaaaaaatccaaagtcctaccacggcccaccagtcaatccattttgccccagatgtctctctttgcctccttccctacaactctccccttgctcacagctgtcccctctctgctcctggaacacaccttgcccgtttctgccctaggactcttctctccacctgataggctctttccctagatatctccatggcttgctccctcacttcgttcaggtctctgcacaatgtctcttgacacccctctatctaaaacagcaacatctcccctgctgaattctcctttacagtactcatcgccctccattgttcatatatttcttttttcatgtatctccttccaatatgatcaactaggaacttaagccccataagaacaaagacattcttcagttcactgctatttccccagcaactacagaatgctcaaatatttgaataaatgaatgaaaattaagtaagtttttcaaaaatctagaacacacttttagcatagagaaaactgaagtaccataggaggttaattcacttcatataacagcataaactgcccttccttaagtaggagacaataggtacaataatgcatgcaaatgttaagtggtaaagcaaacatacaaagtttcccaatagaagagtttaaattaaaatctaaacttccagccaggagcagtagtggacgtctagtcccagctactcaggaggctgaagcaggaagatcacttgagcccaggaattcaaggccagcctgggtaacataggaagaccccatctctaaaaacataaaaataaaaatctaagcctcaaaagaaaaaaaataaataaacaaaaggcatttcctataaagttaaactgttacagaattgtttttcttaaactgcaataatgagactttagcactctcttgtcctctaaaagacattatttcatgacatgtgcccattggcagtatttgagaatctaagaaagtagatcacactaaatattgatatgcagacactaaaatcgtacaaccacttggatgactaggtttgagatattcccaaagtgacaggtttttgttttgttttgttttgttttttgagacaaggtctcgccctgtcgcccaggctggaatgcagtggtgcaatctcagctcactgcaacctctgcctcctgagttcaagcaattctcctgcctcagcctccctggtagctgggactgcaggcatgcaccaccacacctggctaatttttgaatttttagtagagacagggtttctccacgttagccaagctggtctcgaattcctggcctcaagtgctctgcctgcctcagcctcccaatgcaaccagcctttttttttttttttaacttttattttaggtttggggttacacgtgcaagtttgttatataggtaaactcatgtcagaggggtttgttgtacagcttattttgataaaatattaagtattaagcccaatacccaatagttatcttttctgttcctctccctcctcccactctccaccctcaagtaaaccccagtatctgtggtttccttctttgtgttcacaagtccttatcatttagctcccacttataagtgagaacacgtggtcttcggttttctgttcctgcattactttgctaaggataatagcctccagctccatccatgttcctgcaaaaacatgatctcagccgagcacggtggctcacacgtaatcccggcactttgggaggccgaggtgggaggatcatgaggtcaggagttcaagaacagcctgcccaacacggtgaaaccccatctctactagaaatacaaaaattagccaggcatggtggagggcacctgtaatcccagctactcgggaggctgaggcagagaattgcttgaacctgggaggcggaggttgcagtgagctgaaatcgtgccacctgcattccagcctgggcaatagagcaagactccatctcaaaaacaaacaaacaaacaaacaaacaaaaacatgatctcgttgttttttatggctgcatagtattccacagtgtatgtaccacattttctttatccaatttgtcactgatgggcatttaggttgattccatgtctttgctattgtgaatagtgctgcaagtaaatctctttaaacagcaaatctattactgcctgcttttcaatgctttaccctcaagaaacttgggctacaactcaataacaaaaagcagcatttttgttcttgttgtttttaattcagtttcttttttttgttttgttttgtttctaagagacagggtctcactctgtggcccaggctggagtgcagtggcaggatcatagctcactataacctcgaactatcaaactcctgggcctaagtgatcctcccacctcagcctcctgagtagctaggactacaggtacatgctgccaaacccagctaattaaaaaatattttttttttggtgatgaggtctatgttgcccaggctggtctcaaattcctggactcaagcgatcctcctgcctcagcctcccaaaacattgggattatacagatgtaagtcactgcactttggccatgtgttggttttttgttgttgttttttgagacggagtcttgctctgtcgcccagactagagtgcggtggcgagatctcggttcactgtaacctccacctcctggttcaagcgattctcctgcctcgcctcccgagtagctgggattacaggcacccaccaccatgcccagctaactttagtatttttagtagagatggggtttcgccatgttcacctggcctcaagtgatccgcccaccttggcctcccaaagtgctaggattataggcatgagccaccacacccagccttttttttttttgagacagagtcttgctctgtcgtccaggctagagtacagtggcatgatctcggctcactgcaacctccgcctcccaggttcaagcgattctcctgcctcagcctcctgagtagctgggattacaggcgcctgccaccacacctggctaatttttgtatttttagcagagacggggtttcaccatattggccaggctggtctcgaattcctgacctcgggtgatctgcccatctcgggtgatctgcccgcctcggcctcccaaagtgctgggattacaggcgtgagccaccgcgcccagccatcttctcatttctttggtgagattgtttggtttttgcttctgaagattttcctgtttttctttttttgtttttttttttaagagacagaatcctgctctgtcacccaggctgaagtgcagtggcgcgatctcagctcgctgcaacctccgcctcccaagttcaagcatgcaccacctacaggtgtgcaccacaacacccagctaatttttttttttttttttagtagaggtggggtttcactacgtattggccaggctggtctggaactcctgacctcaggtgatccacccaccttggcctcccaaagttctgggattacaggcgtgagccaccacaccgggcctccctgttaagcccagtttatccagtatttctaggtgttttgtacaaaagagttttcagggcatttagcctaacataaagcagaaacaaaagtcaggatgagtcaagtaacagtatttgagaaaacttcagaggtagaaccaacaggatttgctgatgctttgaatgaaagcagagataagacagaacagggaatttaaggatgattcctagatttctggcttgcacaaaggagtagatggtggtctaccatttatttagatggggaagtcagacagggagagaggcacaaacttgcagagagaaaagtttaagagttatattttgggcaagtagacaggagacaactacaagttacttgagggaagatgtcaagtttgcagcaggatgcaggagctgggagcccagagcgactgggtggagggccacacttgctagtcatcacagcggctaacacgtcttcacagtaaaagccaaaacaggcggggcacggtggctcacacctgtaatctcagcactttgggaggctgaggcaggcggatcacctgagaacggggagttcaagaccagcctgaccaacatggagaaacctcgtctctaattaaaaaaaaaaaaaaaattagccaggcgtagtggcgggcgcctataatcccagctactcaggaggctgtggcaggagaatcgcttgaactcaggaggcggaggttgcagtgagccgagattgtgccactgcactccagcctggtcaacaggagcaaaactctgtctcaaaaaaaaaaaaaaaaaaattgaggccaggtgcggtggctcatgcctgtaatcctaacactttgggaagctgaggcaggtggattacctgagctcaggagttcaagaccagcctgggtaacacagtgaaaccccatctctactaaaatacaaaaaaattagcagaacatggtggcgtgcacctgtaatcccagctacttgggaggctgaggcaggagaatcacttgaaactgggaggcggaggctgcagtgagccgagattgcgccattgcactccagccagggcaacaagagtgaaactgtgaaactctgtctccaaaaaaaaccaattttaataggtataccattatacacccattaaaatggctaaaatccaaaacactgacaccactaaatgctggtgaagatgtggagtaacaggaactctcactcactgctgatgggaatgtataatggtacagtcactttgaatatagtttgatagcttcttacaaaactaaacatactcttaccatatgatctagcaattgcactccttgatatttatccagaggaggtgaaaagtcctgcactggaatgtttatagcagctttattcataactgctcaaacttggaagcaaccaagatgtctatccttcaggtgaatgtttgataaacaacatgtggtatatccatacaatagagtattactcaccaatgaaaagaaacaacctatcaagccacaaaaaaacatgaagaaacctgaaatgcatatcatttactgaaagaagccaatctgaaaaggctacacactgtatgtccaactatatgacattctggaaaagacaaaactatggagatattataaaagatcagtggttgccagtggttcagcagaggaatgaataggtggagcacagggggtttctagggcagtaaaactattttatataattgtgtactggcaaatatacatcatcacacatttgtcaaaatccatagaatgctcaacagagtgaaatgtaatgtaaactatggacttcaggctggacagagtggctcacacctgtaattccaacactttgggagactgaggcaggaggattgcttgagcccaggagtttcaggctatagcaagctatgatgatgccactgcaacctggcctggacaacacagtgagaccctacctctaaaaaataataataataaaataaaaatagaaataaaataaactcaggaatttggttaataataatgtatcgagttggttcattagttgtaagggacgtactatactaatgcaagatgttaataatagaagttgtgggagaaagtaaggggtatatggaaactctctgtactttccacataatttttctgtaaaactaacactgctttaaaaaataaagtctagactggccgcagtggctcacgcctgtaatcccagcactttgggaggccaaggcaggcggatcacgaggtcaagagatcgagacatcctggctaacatagtgaaaccctgtctctatcaaacatacaaaaaattagccaggcgtggtggcagacaactataatctcagctacttgggaggctgaggcaggagaatcacttgaacctgggaggcggaggttgcagtgagccgagatcatgccattgcactccagcctgggcaaaaagagtgaaactccatctcaaaaaaaagaaaagaaaagaaagaaaacacgtatctactaaaattacaaaaactagccgggtatggtggcaggcacctgtaatcctagctacttaggaggctgaggcaggagaatcacttgagcccgggaggtggagtttgcagtgagccaagatcacaccactgcactcagcctgggtgacagagcgagactctgcctcaaaaataaaataaaataaaaataataaagtctattaatttttaaaatatattaattgagccgggcgcggtggctcacgcttgtaatcccagcactttgggaggccgaggcgggtggatcacgaggtcaggagatcgagaccatcctaacacggtgaaaccccgtctctactaaaaatacaaaaaattagccgggcatcgtggcgggcgcctgtagtcccatctagtcaggaggctgaggcaggagaatggcatgaacctgggaggcagagcttgcagtgagccgagatcgcgccactacactccagcctgggcaacagagcgagactccgtctcaaaaaaaaaaaaaaaaaattaattgagctttatggttaagtttttaaaaagataaatctgacccataaagtttaaataatagtcaagatggaagatgagtgatctccccaaggagacaagcttttctatgaaaatcttatcaaaatgtataatgtacttagaaaactaagtgacctcattacacatcatagttttgcatgatgtaaccactcttcagagaatatctcattttgtccttcagctcccacacaagagaaggttaaggaaattccactactcatgaaattataatcccacaatgtaagtgaagtggtggctgtgcctaggaaagaaagagaatacacgcttagagagaatctagaaagaaacattatccagtttgtgttggggatagcccatgatctaaattctaaaaagcacacccatatagaacctagcctgggctgggtgcggtggctcatgcctgtaatcccagcactttgggagactgaagcaggtggatcacctgaggtcaggagtttgaaaccagtctgaccaacacagtgaaaccccgtctctactaaaaatacaaaaaaattagccaggcatggtggtgcatgcctgtaatcccagctactcgggagcctgaggcaggagaatcgcttgaacctgggaggcagaggttgcagtgagctgagatcgtgccattgcactccagcctgggcaataagagtgaaactccatctcaaaaaaaaaaaaaaaaaagaacccagtctgaagcatgaattcacattgcgttttccagtcaatcactcagccaaagagaacctgaggtggccaagataatgtaacaaccctatcaagtaggtgttattcccatttacagataaggacagaaatgttaagtgactacacatggatgcaaacttggaatcttcaaactcccaggctagtagccaaattacctgtttttaaatctcatctctgctatctgatctctgccaagcaaatttccctttgaatttgttatgcaaacaattaacgagaataaaggaaaatgagagctttatatacgttacatgtaataactggaagttaactttattaagacatctgaaataagtcaacacttttaaaacttaaaggctattctttaccagaatcgtctgtaggaattaaccccagcagtcagaaagtaccttaaaacaaaaccaacattaatctggtaatgtcatgacttcataaaatatccttaatattcaggtacgtgcataccaagaagagtaaacagaataaaaagaaatctctaaaacattttccctcattcactacatgtctactcttccacttacctttatctctaaaacaaaaacattttctaaaccctgtggacatgacttcactaatccaaagaagactttatattctatgggccttgtaaagccacatttctcaaactaaggaccaaggaccatctgaatcagaatatctgctatgcctgtgaggatgaccccagataaactacatcagaccctctcaggcagatccatagattctttcttctttttaagcaaataacccagggattcttatgttaaaacctttagaccaacctttctcaaactcttcgctctcatggcccctttatttattattttttaaatttaaaagaaataataagcaaaccgggtcaggtggctcaaaactgtaatcccagtactttgggaggctgaggcaggcagatctcctgaggttgggagttcgagaccagcctgaccaacatggagaaacccccatctctaataaaaatacaaaactagacgggtgtggtggcacatgcctgtaatcccagctactcgggaggcttaggcaagagaatcacttgaattcgggaggcggaggttgtggtgagccgagatcgcgccattgcactccagcctgggcaacaagagcgaaactccatctcaaaaaaaaaaaagaaaaagaaagaaagaaaagaaataatagagccgggcgcaatggctcacacctgtaatcccagcactttgggaggccaaggtgggcatatcatgaggtcaggagttcaagatcagcctggccaacatggtaaaaccctgtctctactaaaaatgcaaaaattagccaggtgtggctgctagcccctgtaatcccagctactcgggaggctgaggcaggagaattgctggaacctgggaggtggaggttgcagtgagccgagatcatgccactgcactccagcctgggtgacagagtgagactccgtctcaaaaaaaaaaagagaaagaatgattgataaaccaactgggatactggcagatattttctcaaaaatgaaagaagggaagctgtctgttcagggaaagcaactgacaatatttgttgccaatgataaaatttgagctttagagtaaaaatcagaatttgagaaagtttgtatccaccactgtgagtctgacagttgtctaatattaatgattattaatgaaaccccatctctactaaaattacaaaaattagctgtgcgtggtggcacacgcctgtagtcccagctactcaggaggctgaggcaggagaatcacttgaacccgggaggtggaggttgcagtgagcggagatcatgccattgcactccagcctggcaacagagcaagactccatctcaaaaaaaaaaaaaaaaaccggccaggtgcggtggctcacacctgtaattccagcactttgggaggccaaagcgggcggatcacaaggtcaggagatagagaccatcctggctaacatggtgaaaccccgactctactaaaaatacaaaaaattagccgggcattgtgacgggcgcctgtagtcccagctacttgggaggctgaggcaggagaatggcatgaacccgggaggctgagcttacagtgggcccagatcgcaccactgcactccagcctgggcaacagaatgaggctctgtctcaaaaaaaaaaaattggcggtttatgggtttgtggggggtacaattcctgcctgtccaagtgacagactcatttaattatccccaagttaatgtttaagtgcaatggggtaaaacatgcactctgttaactaaaaagccacatttccaaatagtatacatattacgattaaaacattaaaaatatatgtgtacagatttattcatataagcccaaaaacaaatgtcagacaatgtttctgtctttggaacctgactcaaaataaggttcctcctgttggcttcttcctgagacacagccaacgctaatttgccgcccaggcaaatcatctatgcctatcattaggaaatcaaatttatgatatgcatagcctagaatactactctgtagtttttttgtttttgtttttgttttttgagacagaatcttgctctgtggcccaggctggagtccagtggtgtgatctcagggttcaagtgattctcccaccacagcctcccgagtagctgggattacaggcacacactaccatgcctggctaattttactatgtagattttttaaacatgaggtatatacacatgtatttgcattgagtattctctaagataaagtgacaaaaagcaaaatacagagtttggtgtatttgctgctatatatggaaggaacaacacccagagaataacatgtttgcatgcatacatatgaagtaactcaggagagataaatagtaggtaactagctgtccctgggaaagagtcccaaggataaggtgcggactaactttccacttactacatatcttttgtactgattcatttcaaaatttactctaaaatattggtattacaataaagaaaactggagtctagaactgaatgacaaaactgatacattcttactacaaatctgtggttaagattagcattaatctttcctaggcaaagaggaaaaagtttaacccaaagactgtatggatcttctctaccctacatctccaatctcattcccattactcagaaaatattctcactgggtatagaggtatgaactcccattggaaaacttagggtaaacgtccgtggaatctatggggcactgctgacccaggacacctgggatatttctgcagaaacaggattttttttttttttttttttgagatggagtcttgctccatagcccaggctggagtgcaatggcgcgatctcggctcactgcaacctccacctcccaggttcaagcgattctcctgcctcagcctcctgagtagctgggattacaggcgtgagccaccgcacccagccagattattcttaatcagttgattatttctggctccagaatgcttcaattattccacctgcccctatgtataagcgttaccaccctaattatgcttgtttttgtttttttggttgtttgagacggagtctctgttgcccaggctggagtgcagtggcacgatctcgactcactgcaacctctgcctcccaggttcaagcgattctcttgctttagcctccagagtagctgggattacaggcacgcgtcaccacacccagctagttttttgtattttcagtagaaacaggatttcaccaagtcggcaaggatggtcttgaactcctgacctcaagcaatccacatgccttggtctcccaaagtgctgggattacaggcgtgagccatcgctcccggcctcctaattatgtttcattttggttaatgtttcaataaatgtgctttccctaaacatactgatgaaaagaggcccaaatgcaaaactgatttgtcgagaaagtcagtctgagatgaaatatttattatgtctaaaccacaagtagaaaaaaattcaaaggccgactatttcaatgctaactcaatgcaatattgcactttgtttggtttacgggagaggtaatttacacagctaacatttgggttttcaagattacattgtggggagagaaggggaaaacaagaaaagtctaatgcttttagattctgtcagaaaaagtgtttgctaaaaagcaaaacaaaatgaacatgagaaaaaatgtgaaaaaacatgcattttaggaagctttcaccgaagcaggtgctcaagttcagactcaaatcttccaactcttgtaataaaaatgagaggtcagaataccacaaactaatcaaatcaatcaaacaaagcgggaaacaggtggctgacaccagactgggcagggttttcctaaattgggcttaccttcactaatccaaatcagttttcagaaatggcttctacaaaaactacccaaacatccccctaataatttgcactcctcctccacaatagggaagccaagccgtttatttcccagaaggtttactttctctttcaagctctgctggcttcttcctgccccgcatacggccaggaaaaaagaaaagcactgccttttctttcctgccttctctaaaactggggagatggggtgagagaacctgtttcatggacaagctgggtggttcttaactgcaacactgttctgaatacagattagtttgcaaaggaaagttacaggacaggaaaataaaggtctacccctccaactaactcatacacatgtacatttgcatgtacgcacacacacagatgtgagggcacatttaattcagctgagtaatgtgcagcaatcagctcccagcttcatacctggccaccgggatgcctcctcactcccaccttctttacctgactcaaaataaggttcctcctgttggcttcttcctgagacacaaccaactctaatcattcctcttcccctcaaaccttcaacactacctgcactttctgggtcgggagcaattccttgggtggtaatccatttttaatgtgttaaatattacttaaaataagggagaggtaatcatggactgtgggcaatgcagagatttatcagaagggcatttgtgtaaacaggaatttacagtttgccttacctattccttttatatgacagcctcaatttcctctaacagaatgtaagtcccccatccctattcatttagtttttttcccattaggttagaatctgctaattattctttctctcctttgggtcattagtggctgccatgaatcataatttgcctgactttgtaatatctaacagatattaccattttagtttagtttttgatatgacagttttttgttttttgtttttgtgacggagtcttgctctgtctcccaggctggagtgcagcggcgcgatctcagctcactgcaacccccacctcctgggttcaaaagcaattctcctgcctcagcctcccgggtagctgggactacaggcacccgccaccacaacaggctaaattttatatttttagtagagacggggtctcactatgttgggcaggctggtcttgaactcctgacccgcctcggcctcccaaagtgctggaattacaggcgtgagccaccatgcccgacctcctaattatgttttattccacctgcccctatgtataagcgttaccaccctaattatgctttttgtttttcggtttttttgagacagagtctcactctgtcacccaggctgtagtgcagtggcacgatctcggttcaccgcaacctccgcctcccgggttcaagcgattatcctgcctcagcctcccgagtagctgggattacaggtgcccaccaccacaactggctaatttttatatttttagtagagacggggggggtctcactctgttgggcaggctggtcttgaactcctgacctcaggtgatccacccgccttggcctcccaaagtgctgggattacaggcgtgagccaccgcactcggcctgatattatagtttttaataagagtaattcagcctaggcaacgtgacgagatcctgactcaaaaaaattagaaaattagctgagggtggtagcacacacctgtagccccagctaccccgaaggctgaggcaggaggatcacttgagcctaggaggtcaaggctgtcatgagctgtgatctcaccgctgcactccagcctaggtgacagagtgagaacctgtctcaaaaaataaatagtaataatagtaattattagcacttgaatgttacctgtctgcccggcactatgcaaagtacttgatatgcatcatcttgcttcatcctctcaattactctacaagtggacctcgtttccacaattgtggacagagaaactgaaaaccagagaagtgaaaacaacaggcccaaggtctaagagaaggcagaactgggattaaagcccaataggtctgacctgatagtccactcttttaactgctatagtaactttggaccatgaaaccctcaaacataccaaccaagtgtttcaaaactacaatagcaatcaccttaggaatactcaaaatataagttctttggctgacgcagttaaaaattcaaaggtcaggtaaaatttcagtgatgagcaaggtcatttattcttatggctgggggtagcaggaaggaaagccggatcgtcgaagcattattttcttgtaggggcagatttaccttccttattattcttttgctaggctgttaaaaggaatttggaaggccaggcgtgctggctcacgcctgtaatcccagcactttgggaggccgaggcaggcggatcacaatgtgaggagattgagaccatcctggctaacacggtgaaaccctgtcgctactaaaaatataaaaaaaaaaacattagctgggcgtggtggcgggcgcctgtagtcccagctactcgggaggctgaggcaggagagtggcgtgaacccgggaggcggagcttgcaatgagccaagatagcgccactgcactccagcctgggcgacagagcgagactccatctcaaaaaaaaaaaaaaaaaggaatttggaataaatatgtctccaagataacctggtaaacagaaagggctgcaaaaaatctgaataaaagcaagtcaattaacaggatacatgtaaaacacacattttatattcctacaagtctttttttttataatagcatgttattacttttctaaaaaggacaaaataacttattttaatgacatttaaacccaattattaacagaaaagggataagaactgtggttccttggcctcctttccccttggtttagttctcctaaattaagaacttctacttatagctccctgaacacacaaggctgttttaagcctctgcaccctcatgttccttcagccttgaatgcaactttttgtaacgcaacttcgtggaaagaattcctattcatcctataaaaccctattcaggtgttcccatctgataaagcccctcaataatgatgactttctctcactcctgaaaagaattaatctcttttcttggatatttagtaagaacttagatttaccgagctcttactatgtgccaggcactatgctaagcattttatccacattatcttattgaatcgtcaacagtacctacaagataagcactgttataatcttcttttacagataagaaaatagaggctcagattctgactaggaagtggcagatccaggattcagtcccagatctgtttgacttcagagccagagtcttgaaccactcactgccctgtcgtctcccctgtcctacttccatactggcatagcacacacctcggtccctgcaacatctccagtttcatgaaaacggacaatatttcattatccttggatcctgcctgacgcaatacctggctctcaacatgtttgctgatctgaattaaagagttgcggtaatccttttttttttcttttttttttgagatggagtcccactctgttgcccaggctggagtgcagtggcacgatctcagctcactgcaagctccgcctccaggactcatgccattctcctgcctcagcctcctgagtagctgggactacaggcgtctgccaccacgctgggctaattttttgtatttttagtagaggcggagtttcaccgtgttagccaggatggtctcgatctcctgacctcgtgatccgcccacagcctcccaaagtgctggaattacaggcatgagccaccacacccggctgggtaagagttgcagtaatcctaacatgacaaatgagaactgaccataacagaaattcattcttccatatgttattcccaggcctcataacctctccttcctctgaagacatgtagcattcagtgtagcactgtcagaatgtctcactctgtcccccagtctggagtgcagtggcaggatcttggctcactgcagcctccacctcccaggttcaagcaattctcctggctcagcctccagagtagctggaactacaggcgtgtgccaccacacctggctaatttttgtatttttagtagagacggggttttaccatgttggccaggctggtctcaaactcctgacctcaagtgatccgctcacctctgcctcacaaagcgctgggattacaggcatcagccaccatgcccagcctgtttttgccttttttttttttttaaagaaacaaagtggtctcactatgttgcccaggctggtcttgaactcctgggctcaagcaatcctcttgcctcggccttccaaagtgctgggattataggcatgagccactgctcctggcccgatatgctactccttttaaaaactggaggcatctcaaacaatttaccaccaaaggaccatgtggccatactgactaaagcgcactacactttacgcttacgtcttgtaagccaaggtgtctaacaaagagtatataaccaccatattaattctttacaccataatcaataagggctgggccagcccagcaatgccatcctcctggatctcactgaggctgctccagaacaccagaagttcttcaggattcggggatgtccctcaagtactctttcagtggtttttataaatgactcaaaagttatggtgaaatttttaagtgccaaagacataaaatatgagtggtggtttgtatccaatcaaaaatcctcaaaaaacacttctgcacttaagcacactatacttttttcacccaaagtaccaaatcaaactagtcaggatacctacctttgtacaatgtcagactccagttaataactcccctagggcagagggcatatgcactgatttactttgtacaaattaaccagcatcaggcaatcaggcctgtgcctaacacatagtaagcactctatgattaaacatcagtgcttcggctccaaagttttatttatttatttatttatttattttttttttttttgagacggagtctcgctctgtcgcccaggctggagtgcagtggtgcgatatcggctcactgcaagctccgcctcccgagttcacgctcttctcctgcctcagcctcccgagtagctgggactacagacgcccgccacaacgcccggctacttttttttgtatttttagtagagatggggtttcaccgtgttagccaggatggtctcgatctcctggcctcgtgatccgcgcgtctgggcctcccaaagtgctgggattacaggcgtgagccaccgcgcccggcgccccgaaagttttaaaagcttcccctacaaaagaacagaactgaaattccttggtcctgtattcaatgtcttttgtaagtaatcacttctcccctacttaccctcctagtctaccgggctaccaggaattttttttttttttggagacagggtctcactctgtcacccaggctggagtgcggtggcgggatcacggctcactgcagccttaacccccggggcttgggtgatcctcccaccttagtctcaccagtagctgggactacaggtccacgccaccaggcctggctaattttttttatttttaggggagagggagttttaccacgttgcccaagctggtctcaaactcctgggctcaagcaatcctcctgcctcagcctcccaaagtgctgggattacaggcataaaccaccgcaaattctttacacctatcaaattccacccattatttgggacccagttgaaatccctctttggcaaaaagactttctagacaactccaggcctcataacctctcctttctctgaagatctgtagcattcagcctagcactgtccaatagaacgttctatgataacagaaaagttctacatctgtactgtatgttcttttatgtagaacagctaccttgttagcacaagtgtaaagtctcaccatctctttgatgacaacatgttacattggatggttaaaacatttatcagctcccccagtagactgcaatttctgtgaacaagatacaacttattcttcatagcaactctgacaaagttgcaaaaggtatatatatgttggccaggcaaggtggttcacgcctgtaatcccagcactttgggaggctgaggtgggcagatctcttgaggtcaggagtttgagaccagcctggtcaatatagtgaaaccttatctctactaaaaatacaaaaattagccgggcgtagtggcgggcacctgtaatcccagctactcaggaggctgaggtgcgagaatcacttgaacccgggaggaggaggttgcagtgagccacgatcatgccactgcactccagcctgggtgatagagtgcaactccaactcaaaaaaaaaaaaaaaaaagtatatatttgttgatttgcacatcacctaagaaaaccataagctaagaaggtttggactcaggcgtctggaaagttggtcaccacctctaccccacctcatatctgaatgtcaagagacacgtagaggcagagaagttaaagcaactttctagagacagaaatgaccactgatcaagccacaatgcactctggtttaaatgacatttaggtcatgactgtccttaatctaaaacaaacctagattagtatttcttttcattagtaaatagctaaattctgatggtaaattatgctgaccaaaaacagttcctcacttcccaagttagacatagcaattagaaaaataatctaagcaagctccatttgtatttcttttttcacctgtttattgaatatttacctcccatgaagtctttcagcctattggtggtattttactgttcagatatatgttagaatttcactgatacttactgggcgcggtggctcacacctgtaatcccagcactttgggagatagaggtgggcaaatcacaaggtcaggagttcaagaccagcctggccaatatggtaaaaccccggtctctactaaaaatacaaaaattagctgggcgtggtggcgcacgcctgtagtcccagctacttgggaggctgaggcaggagaatcgcttgaacccaggaggcagaggttgcagtgagccaagattgcgccactgcactctagcctgggcaacagagcaagactctgactcaaaaaaaaaaaaaaaaagaatttcactgatacttttcacaaaatatacagaaggaggcacaaattccaccactatggcactctgctgcgttggccaagtgtcttgatcctttggcctcaattttcttatctacgatattagggtaattgttatgtgaactacccacctcacaagtcctttgtgggttaattcataactgtgctgtgggtatttctttttctttcctttcttcctcctttcctttctttctttcttaaagatgggttctcattatggtgcttagactagactctagacccaattcctggcctctcaccatgttgcccagaccagactcaactcctggactcaaggaatcctcccacctcagccttcaattagctgggatcagaggtgtgcaccaccatgcctggcactgtggatatttctaagtgattattcttctcaaatgaactacataaaaaacaaaagattcatgaatttactaatggttctttgtgatggatgtgctaatatagagactaaaatcaaggctccaacctctaaaacatttttttttaaattccagacttgtttccccatcccactgtgcaaactgaacaaaaactgggctagcactcctgtctggaacatgtaataaggaaataaatgtgctgactcagagaacacagacatatttaatataaaataagatagaaaactggctgaaccaagtcataacacagtctaaatccacatataaaagattgagatgattttctgctttgctttattcaagcccaatgctttatcagcacagccagccaaaaatttacaacccatacacagactatgtaaacctttagttgcacatacagtaagaccagcaggtacacactatacacatttttaattaaaaaaatgactaaccactgattttgtcaccacacttaacaacgacctgatatggcacagagtgatgtgtaccaaacatggaaataccaacttgggcgacggtttgaatcttgttaacttcagtgcaaccacaccccccaaatgcatgtaaagtttgcacacatggttttttcaaggccagcctgtctttgtttccctctcctctgcatttacccaagatcttggctctgagacagaaaactcccactctcaattggttcattccgtcctatgcaattaagcaacaccacaatccagtaaatgcaatggctcaattatttatcttctggccgactttaccaggtatttggaaaaggacaatgtcaagaggtttatttctctctctagagctggcttgacgggttgatggggattttattttgtctttttttctcttttttacaaggcggggacgtggggggagcataatttaacctagaaaaagatgcgagggaatttagaaagagtaccggtctgtcaatttccctacaggaaacttgattcttatgcaataaagcctacccacgaccagccagcccgtaaggctgcaggcgacagacacacctattcctgcctccaaaagggcacagctgtctcctgaaggagcgggaacagggcaagcggaggaagtggctcagcgggagccgccgaccgggcggggaggaggcgctttccgaccccccactcgcgccggtgatccccgtcggcgtgacagtcgctccggtggccggaacgtccccagggccccagggagcaggaaatcgggggactgtccctcactcctgccgccgcaaccgagtgcgccctcgccccacggtgccccctcgagcgcgttctgtttctccgaagaacgaaacttccctccagcgccccgagtcccttccgaggcccgctcctgtcatcccgaagagtcttccctcagggcgaccctccgcgtctcttcatctctcccggccccactgcagcgtccatcacaacatccccaaggtcccagaggccccctgccgctgcggagcccccgggtccccaggcctccccaacggccccaccctgcacccccttcacctgtttctccggcagaggccgagaggccggggctgcgcgtgtgccggggacgggcggcgaggctccctcaggccgaagggcctctccgagccgagggggagagacagcgccaagccggggtgcctgtccaggatccggttggggcttgttccctcggctgcgacgtcggaacccccggctccccctcccagtctgcgccgccgcagctccggaaaccgctgaattacagccccttcagccaatcctcgcccagccccagcctggccgaggcacgccgtcatgcataattcatgaaaggccagctcgttcggccacccagaggtcccagtgcgtgtgcggtacagccgaagccccgcccactgaccaatgaggagagcagctaggagaaagggcggagccaagaggagactgatacgcccctgtgctggctgttccgacagttcggtgctcctccctccgccacagcgagggaagagccgaggacttgggcacagaagcccggggggagggagggaagatgaccggaatgtcctgctgaaaactcagctgagttcctggcagtgcgtgacgtcaaggcactttaaatgcccctgatacagctccctcctgcccgctctcccttttcccggcccttggcaccacgtggtggcgaggttgagagcctcttaccacgcgggaatcagctagttagatagtccccaggtatctccagatcctctggggacccaactcctgaattgggttctggggacaacaaaaagaacatgggtgactccgcctgctttgaacttcagtttctgcgtgagcagggacacacacacccggaaacatgacgtggaaatagagtaattactagagtgcgtggggagagggtagtggatttaaccccgtactccgttccatcacttcaagcatcaaacgccgaccagctagcccattggcccgtacaggcgaatgcagaagacggtgtatacgaaagctgataacgtgtagggcttgacatttttatgcgtctgaattgaaatacatgaaatgttctgcctttttcttttccaccttgcctacttggtatgcaagttttactgaattgaagccagtggttgataggaaatgtagacattttgcctttcataatagaggatgaactttgcataatggagtgatttctgtgtatgtgctgatactatcagggtttttaatttttatttttttgggtctttaaaaatatgttattaatatttgtgtttgtttaatacgaacaggtataaagacaaaaatctaaaaaggacccattatctcactgctcagctaacccctgacatattttttttcaatgaacctaatacatgttcctgtttagaaaatgcagaccgttcagaaaggtcaaaaatattaaatgaaaatctttccctacccccatcattccttctccccaaggatagctgttcttattaatttctagtgagaaaaatcaatgactcttaacctttgaaggcagtcacagatccttctgagtgtttgaaggagactagattctagccccagaaacaatacaaggttttactcacatggttccccagatacctgaagcctgtctaagtctacagattcagaccgctcgtaccacctcatatccaatgagggacagaggcatctacagggcaattcatagggtcactggtggtgagaattgagaacctcctattgccctctggtagacacagctcagtatggaaattgctgtatttacctgtagagtgtgtgtgtattgattaggctgtttatctacaccacaggacagatatcccccatctccgcctatagtctcttgtaactacgctatcccgtgcggccaactgcctccctgataacatagggtctaggatttgtttagtgatttactgcttacaaaggacttacacaccttatacactccctgcctggtttctttctcacaatcatgaatagcagataggagaggccatattatccgctgatagaaaactaaagacaacataatatgacattttcaagatcacagagaaactcagaaatataccaggttcagagtcaggtttgggggctttacgtcccatagctttgttccattcattcaaaccctgccctgcttctgacttctcaagagctggcctctgtttccctcattggcctccccaccagtaacacataaaatctacctctgcgactatgggtttgacctgcaaaaattctcttcagcccagacactggcctttctccacaaccccgccaaattcctcttggctaaatgctgcaatttctgtcccttgggccactgccttaaccacctgattattctctccttattctatcctattcttccactggctgccagggacatcatcctaaaaattaaataaataaacattcaggccaaggcgggtggatcacaaggtcagttcaagaccagcctggccaacacagtgaaaccccgtctctactaaaaatacaaaaattaggctgggcactgtggctcacgcctgtaatcccagcactttaggaggctgaggcgggcagatcacctgaggtcaggagttcgagaccagcctgactaatatgatgaaaccctgtctctactaaaaatacaaaaatcagccagtcatggtggcttgcacctgtaatccctgctactcgggaggctgagggaagagaatctcttgaacccgggaggtgaaggttgcagtgagccgagatcgcgccattgcattctagcctggacaacaagagcgaaactccatctcaaaacaaaagtaaaaattagctagccatggtggcacgtgcctgtagtcccaactactcaggaggctaaggcaggagaattgcttgaacccaggaggtggaggttgcagtgagcccagatccctccactgcactccagcctaggcgatagagcaagaccctggctcaaaaaaaaaaaaaaaaaaaaattcaatcatgtcacagtcggcttaaaaatctctatggttccctactaccggcaagataaaatccaagttaatttttttttttttttttttttttgagacagagtttcctcttgtcgcctaggctggaatgcgatggtatgatcctgggtcactgcaacctccgcctcccaggttcaagcaattctcctgcctcagcttcccaagtagctgggactacaggtgcccaccaccatgcccagctaatttttgcatttttagtagagacggggttttactgtgttggctaggctggtcttgaactcctgacctcaagtgatccgcccacctcagcctcccaaagtgctgggagccaccgtgtccggccaatccaagttaaattttaaaaatgctgaccaggcacagtggctcatgcctgtaatcctaaagctttgggagaccgaggcaggaagatcatttgaggccaggagttcgagatcagcctgggcaacatggcaaaacaccaactttacaaaaaattagccgggcgtggtggtggcatgcctgtagtcccagctattctgaggactgaggcaggaggatcacttgaacttagaaagaagttcgaagttacagtgagctatgactgttctactgtactgtagtctgagcaacagaacaagaccaaccttgtctcaaaaacaaacaataaacaaaaagctgaccatttaattcagtgccatggctgggcgcggtggctcatgcctgtaatcccagcattttgggaggccgaggcgggcgaatcctgaggtcaggagttcgagaccagcctggccaacatgatgaaaccccgtctctactaaaaatacaaaaaaattagctgggcatagtggcgggtgcctgtaatcccagctacttgggaggctgaggcaggagaatcgtttgaacccgggaggcagaggttgcagtgagccgagatcatgccactgcactccagcccaggcaacaaagtgagactctgtctcaaaaaaaaaaagaaaaaagaaaaaaacaccataattcagtgccatgcatgtggtaggagctcaattgatgttccttctttctccctctttatttgaatcataaaatcctacaggcccagcacagtggctcacgcctgtaatctcagcactttgagaggccgaagcgggtggatcacctgaggtcaggagttcaagaccagcctgaccaacatggtgaaagtctgtctctactaaaaatacaaaaattagccaagcgtgttggcgggcacctgtaatcccaggtactcggtagggtgaggcagaagaatcgcttgaacccaggagacaaaggttgcagtgagctaagattgcaccattgcaatccagcctgggtaatacagtgagactctgtctcaaaaaaaagataaattccacaaaggctgacctgaatccccccttttctaacctagtcccacaaaccctactaaatgtgttaccttcctccaaacatgtctacaccttctgcaacttcatgcctctgtggatagtcttccttctacctggaatctctttcctcagtccctacctgagaactcttactcattcttcaaagccctgttgcaacatcacctcctctaggcttccttctattcttactggcaaagttaatctcctaccagactccttcggcaggttgtttccccatctagaatacattctctaccttgaattctaataaatccacatattggcctacttcctgaaaaaaaacaataattaacattgattaagtaattactactatattccaggaactgtgctaagcattttacatagattatctcatttgatcctcaccagaacccagtgagggtaatattataattcttattttacaattgaggaaacgaagactgagaaagtgaaagactggctcaagactggtctcacagctagaaactaggtggaaactcagaatgaaaatcaggtctggctgactctctggccacgtgctaacaaacatcttcccctaaactgtgggttcctggaaacttgaaccccttaagccctgtcttcataatctcagcatctatcatctagcctagagctcacctaagactgaattaattaaatattaataaataagtcttgaggcctgacgtggtggctcatcctgtagtcctagcactttgggaggctgaggcaggcggatcacttgaggtcaggagtttgaaaccagcctggccaacgtggtgaaaccttgtctctactaaaaatacaaaaattagctgggcatggtggcgggtgcctgtaatcccagctacttgggagtctgagggaggagaatcgcttgcacctgggaggtggaggttgcagtgagccgaggtagcaccactgcactccagcctgggcgacagagcgagactctgtctccaaaaaaagtcttgaataatgacatcagcattaacaaacacagagtgttgaatatgtactagccactgttctaagaatgtaattcatgtaacatatctgtgaactcatttaatccttacaataaccccatgaggcaaatactgtgactttatagatgcagaaaatgagacttacctaaggctaagtcacttccccaagaacatacagctggtaaatggcagagccaggattcaaattcaagcacagtttgtctaaattgagagctttatatctgtttttccttaattataactatatttgtgtccaaaattctcgttaaccctgtgagaactgcttcacctcttccccgaaggaattagcagtaaaacccaaagtcaagaggaaagcatagcaagaaagagaaccttggggatggtaagtgggtggcaagtcactgtggtgaccaaagggagtaaggggcaacctgtgagggtgatgagatcttcatggggttcagcaacagaaaggctcacccagggctgcccaaaactcccactaatatcacagtgaagagcaggtctgcgcaacacaaactctttgggccttctctctgccaaaacacctcaggcatcgttatgcagatatgtctctttccttcagtctgaacagtcctccccactcaatattttctttttttttttccttttttgtttgtttgttttgagacggagtctcgctctgtcgcccaggctggagtgcagtggcgcaatctgggctcactgcaagctccgcctcccaggttcacgccattctcctgcttcagcctcccgagcagctgggactacaggctcccaccaccacgcccagctaactttttgtattttttttagtagagatggggtttcaccgtgttagccaggatggtctcaatctcctgactttgtgattcacccaccttggcctcccaaagtgctggcattacaggcgtgagccaccgctcccggccttttttgttttttgaaaccaagtgtcgccctgtcgcccagtctggagtgcaatggcacgatcttggctcactgcaacctccgcctcctgcaaactcctgaccttgtgatccacccaccttggcctcccaaaattctgggattacaggcgtgagccaccgcgcctggcccccagctcaatattttcaaggctatgatgttttttcctgtatcgcttaacacatcattcataccatgtccttcttttcttccagtcaattctcatggggctttggatacagttcttctttatctcatctccttcaaggccctgcctaccccacctacatctctgctgcccactaaattccagccagtccacttcccagctcaggacctttgcatatgctgttccttttccttccccggctttggcgtggctgtttccttgttactccaacagaccttgtctaaccactcctatctaaagttattcacagcctgttaatccctatttctatatcctgtttcctgtggaattcatcacagttcttttctatttatttaattttttttttttttgagacagagtctcgctctgtaacccaggctagagtgcagtggcaagatgctggctcactgcaatctccatctcccgggttcaagtgattcttctgcatcagcctcccgagtagctgggattacaggtgcccaccaccatgtccaactaatttttgtgtttttagtagagacggggtttcaccatgttggccaggctggtctcaaactcctgacctcaggtgatctgcctgtcttggcctcccaaagtgctgagattataggcatgagccatcgcacccagccttattttattttattttttgagatggagtctcgctctattgcccaggctggagtgcagtggcatgatctcgagtacagtggcacaatctcagctcactgcaatctctgcctcccaggttcaagcaattctcctgcctcagcctcccaagtagctaggattacaggcggacaccaccatgcctgtctaattttgtatttttagtagagatgggatttcaccatgttggtcaggctggtctccaactcccgatctcagatgatctgcccacctcggcctcccaaagtgctgagattacaggcgtgagccaccgcgcccggccttattttgttattattttttttgagacagggtctcactctgtcacccaggctggaatgcagtggcatgatctcagctcactgcaacctcttcctaacaggcttaagagatccttccacctaaccacctgaatagctgggactacaggtgcgcaccatcacccctggctaatttttctatttttagtagagacagggtttggcacctctctctgtcacccaggcaagagtgcagtggtgtggtcatagctcactgcagctttgaacccctgggctcaaggcatccgccagcctcaccctccctagtagctgggattacaggtgtgtgccaccatatccagctctgtttatagggtttctcatctatctttctctttatactgttagttccaggaagaggtgtcttctctgttccaggctcccttgactccccagtcaacatgctgacataatagatgctcaataaataatgaatgcatggaagtgctcttgatcccgcctctcccctctttgagtgttctcaattctcttctccttcctgaccttctccacttgttctcttctttctgacttgaagatccttcctctctcctatactgaccttgctatttcctcaagttacccccatcacttcacattcattgccccatgtcctcatccccacttgctccatcaaggtggtttctgccctctcttgttcataggacagagctcttgaagggctaccagggacctcctcatcaacgttgatatcttttttttttttttttttgagatggagtctcgctctctcgcccaggctggagtgcagtggggtgatctctgctcactgcaagctccgcctcccaggttcacgccattctcctgtctcagcctcccgagtagctggtactacaggcacctgccaccacgcccggctaggtttttgtttgtttgtttgttttgtatttttagtagagacgggatttcaccgtattagccaggagggtctcgatctcctgacctcgtgatctgcccgcctcggcctcccaaacgtcaatatcttattagtcattttacttaactttgcgttgaatctagagctgttatcctcctcttccttcctacacattctctcctcccttgaccatcacagcagttgatagaagcaattgcattaaattgagagctgaggggagctgaggcgagacatcctggctctgacacagaagaagctgtgcaaccttgggctagctccttaacctctttgaacctcagcatcctcatctgcaaatagagaacataattctaactttagtgaatttgcattaaagtgttttttgttggaagatactctccagctgaccatgcagcatagcagataagagtcaggtcctaagccaggtgcagtggctcacacctgtaatcccagcactttaggaggctgaggcgggcgaatcacctgaggtcgggagtttgagaccagcaagaccaacatggagaaaccctgtctctactaaaaacacgaaattagctgggtgtggtggcgcatgcctgtaatcccagcactttgggaggccaagacaggctgatcaacctgaagtcaggagttcaagatcagcctggccaacatggtgaaaccctgtctctattataaatatacaaaattagccgggcatggtggtgtgtacctgtaatcccagctacttgggaggctgaggcaggagaatcgcttgaacccaggaggcagaggttgcagtgagctgagatcatgccattggactccagcctaggcaacaagagcgaaactccatcacaaagaagaaaaacaaaaaacaagagcccttttagttctagcacaccaaaattcttttttttttctttttctttgtctttttttttttttttttttttttagctagagtttcgctctttttgcccaggctggagtgcaatggtgcaatcttggctcactacaacctccacctcctggggttcaagggtttctcctgcctcagcctcccgagtagccgggattacaggcatgtgccaccacgcccggctaattttgtatttttagtagagatggggtttctccatgttggtcaggctggtcttgaactcccaacctcaggtgatccgcctgccttggcctcccaaagtgctgggattacaggcttgaactaccgcacccagcctcacaccataattctataattattaatcaagccttcagccctatgcctttctgctttcacgctgttcgttttgcctgaagaacctccctgccccgtatcactgcttgcatttcattcacacgtattgtgtacctgcctagctcacaggtcctcttttcctgggagtttcccctcctccctgcaatcagacactgaaatgggtcccttcagccacatctgtattatatgatcctgtcctcctggcctttgattatttattttttgtttatttatttatttattttgagacggagtctcattctgccaggctggagtacagtggcgccatctcagctcactgcaacctctgcctcccgagtagcttggattacaggcgctcaccaccacgcccggctaatttttgtatttttagtagagacgggggtttcaccatcttggccaggctgatcttgaactcctgacctcgtgatccacctgacttggcctcccaaagtgctgggattacaggcctgagccactgtgcctggcgggcgttattaaactcagggcaaacactaatgtgaactagcttactcagagtctctctgtcaggaatttggaatgttgaaatagaaaggcacagagcctgggagcccttagagctgagttccattaatatcagcactcagggagcactccctctgcagaagtccctggaaatcccctgattcctactctttcactaagtaacataaaccactataattgtgtttgagacacttttaggttctggtgacacaaatatcaagtaaaatgctgcctctggcctccaacagttatctattgaaatcctgcccatgtttagaatcacagctgaaaagctcccttcttcctttaagttttctcatattccccaagcaggattaacccttctccagggtattgtcattgcactttgctttacttctcttaccttaagtcatgtctttgagcttgtatttacttatgatgtatttgtttgtttgatgccttgaagatctttctggatattattgtgttcgtgcaaaggtaattgtcgtttttgtcaaagtaatggcaaaacccacaattacttttgcaacaacctaataatatttatttatttaaacatttttgtagagatggggtcttgctgtgttgcccacagtcatctcaaactcgtgtactcaaacaatcctccctcctcagcctcccacagtgctgggattacaggtgtgagccaccgtgccaggccactttgagctattttgaacagctgcctctcccactaattgcaaaccctttaaaattaaggactagatctggctgtctttttaagtctctcagctcctggcacagaatcacaaacagatcatttggaaagaccatctgttgttttgtctgcccatctttctctctctttttttccccctccttaaaaaataaatgaataaataggccaggctctgtggctcatgcctgtaattctagcactttgggaggcccaggtgggtggatcatttgaggtcaggggttcaagaccagtcttgccaacatggagaaaccgcatttctactaaaaatacaaaaattatctggaaatggtggtgggcacctgtaatcccagctacttgggaggctgaggcaggagaattgcttgaacccgggagacagaggttgcagtgagccaagattgcaatgctgcaccagcctgggtgagagtaaggctctgtctaaaataaaataataaaaaaatagagacagggtattgctttgtcacccagactggagtgcaatggtttgggtcatagctcactgcagcctggaacttctgggctcaagcaatcctcctacctcagcctcctgaatagctgggactacaggcacacaacatcctgcctggctaatttttgtattttttgtggaaaaaggatcttattatattgcccaagctgatctcgaagtcatgggctcaagctatcctcttgccacaaactccaaaagtgctgggattacaggcaggcgccactgcacccagcctcccttttctattggtaactatatccctgttttcctttgagaaaacagccctccttcacttgtgattgttaagtttaggtgtcaatttgactagattaaggaatacttatgaggtgtttccagaagagattagcatgtgaatgtgaagggaggaagtggggaagatctgccctcaatgtgggcaggcaccacccaatcagctccccctaacccaccatagaacaaaaaacagagaaatagctgcgttggtctctctcctggagctgagatactctcctcttctcctgccatggacatcagaactccagcctctctggcctttggactccagcacttacttataccagtggcctcctgggttctcaggcctttggcctcggggtgagagttacaccgtcagcttccctgattctgaggctttcagagttggactgagccaagctatggcatcccagggtctccaggttgcagatggctcgccgtgggacttcttagcctacataatcaaataagccaattcccccaataaattccctctcctctatctacctatccatccatcctattggttctgtctctctgaagagccctgattaatactactcttaattccacatttcaggtgggttctacaagtgatcacatgacctgtgtttggtcagagccatagtgatttggatatgtgacctatcagggtatgacagctgagattctggctggacaaatctggaaagaacccctcttcactggggttgctcacctgttagtccataagcctgctgctatttatggtcacttttgccaccacatgggaagaatctgattattattattattattattattttgagacggagtctcgctttgtcacccaagctggagtgcaatggcatgatctcggctcactgcaacctccccctcctgggttcaagctgttctctcacctcagcctcctgagtagtcgggattacaggtacctgccaaaatgctggctaattgttttatttttagtacagacggggtttcactgtgttggccaagctggtcttgaactcctgacctcaggtgattcacctgccttggcctcccaaagtgctgggattacaggcacgagccaccttgcccggccctcttcctcatcttataaagtcactggtcccatcatgggagccccaccctggtgaccttatctaatgctaattaccttgaaaaggccccacttctgattctcctcaacatatgaatgtggggtttccaacaaatgaaatttgcgctgggtgtggtggctcacacctataatcccagcactttgggaggccaaggcaggcagatcacttgaggtcaggagttcaagaccagcctgcccaacatgatgaaaccccatctctactaaaaatacaaaagttagctgggcgcagtggcacatgcctataatcctagctaattgggaggctgaggcaggagaatcacttgaacccaggaggtggaggttgcagagcagagattgcgccactgcactctagcccaggtgacagaacaagactccatcaagaaagaaagagagagagagagggagagagacagagggagggagggagagagagagggggagggagagggagagggggagagagagagagaaaagaaagaaaggaaagaaagaaagaaagaaagaaagaaagaaagaaagaaaaagaaagaaagaaagaaagaaagaaatatgggtaatacatttaaaccatagcagtgcccgtcacagggttgtggggagattgaaatatgctgtgtggatacaactgggatatgtcatgtactttctttaccgatattcagccctctgagggcctctgatattcccctcccctaggctgcctcctctaggcctatgattccaaagggtatgtgtgtgggaagctcaggctgagtacagtaactgggtgtgtctggagggctaatgccctgactgcagggaagtggatccagggggcacagggttacagaccctgtatagacacagggttataaccatgaaacagactatacaacccggtacagacacagggttataaccatgaaacagattgaggatccaggtgcctttgaatcccagctccactgcttcccagctatggcaccttagacaagtcactgtttcctcatatctagactgggaatgataatgataggctctgcctagaggggctgttatgagattaaataagcaattccataccaaagtgcttagaacagttcctggtagagaataagggctcaataaattggcaattattgttatctccctggccttcccccaccccaggcacgtgagacaagtttataccaacagttctccctccctctctttctctctccttcccacctgccctctgtaaccctatgtaactgccttcagagaatacaatcaaacacagatccttttagaaaagcaggtttattggtcgggctgctcaccaggacacagcaacgtgagaggttccccaagcccacagaaaactgcatctgcccacagctcaggccccttcaggccatcagcaccaagggaccttgtcccacaatccccaacctccctcggcagaggggtcttcagccattcagaggagagaagagaaccgagaaagggaaaaggaagaaaaaaaaaaaaaaagcaaagctttgtattgtataaaaggtttgtgtccccaggctccctcccccaatcccttaaaacaatgaactgcagttctaaaaagcagggcagagaaggtaaggagcaggtggggggaaggaggaagctctcggggcctcccttcaggctgtgactggggagaggggctgttcttgcttctgacaaaccccctttaatggggaggaacaaggggactcgtgtcttgagaacctggtcgtgtcttgagaacccagtccaaacagaatcaggcctctggactgggagcaacactcccttcacccgcaaagattcaggaaaagcaccccaaggacaaggaaaccaatgaggtctgggctagctctgcagctttaggatactagctctagggaaggattttttcctttttaaacagcgtatcactctgttgcctaggatggagcacagaggcaccctcatagctcactgcagcctcaaactcctgggctctggcgatcctcccgcctcagcctcccaagtagctgagaccacaggcacgtgccaccatgctcctagggaaggagcttgagaagaaactgccaggagtgaaccagggctggctgctctgtgatgttctctccccacctcccctccagctctcaacttggtggcagggccggcaccctgctctccctcctaactcccagcctgctgctgcccccttctgggaccctaattttctggactttgagaaatgggctgcccctgggggtgcctccaagagcccatttgagggatcgggtggggctgacctctctgtcttctttggatcatcgccttctcacactgtcctccctcttgattctgaaaaatggtcctgctgcccatggagaaccacagtaagatagatttctcatgcagctagtgaggggacttctctcttcacccatttccaccttctcctattttccttttttttccttctgttgagatggagtctcactctgtcacccaggctggagtgcagtgtcgcgaccttggctcactgcaacctccacctcccaggttcaagcaattctccccacctcagcctccaaagtagctgggattacaggcatgcgcaaccatgcccagctaatttttgtaattttagtagagatgggttttcgcttagtagagatggggtgtttgccaggctggtcccgaactcctgacttcaggtgatccgcccacctcggcctcccaaagtgctggggttacaggcataagccaccaagcccggccgaccttcttctatttttccattctcctttccaaagccatggccatgcgctcctgtgtacaggtgcataaacacatcagtgtgccatccctcacatgcatgtcgttccccacccctccttcccagggcttctcttggctccagcgttcctctgggaccctctgcagatacagcctgtgctggacccccagccagggtgagggctcattctgctctgtcttccccactgcctcagtttcccccaaaagctgctttcacgtccttctagtagggggcctcccatgggggcagggatcccctttaggattcaatctttcctctttgggcagttttggctttgagtcccccagggatcagggtgagaatgaagaagagctcagtgagcggaatgacagcagctgggtgggtggtgtggggagaggctgaggggaaggcagcccccccaggggggcctaaccgtggaatcactgcaatttcctctgagatcccgacttggacaaccaggacagggattgaccattcccttcccattccactcggactgtgtccaagcgggggttgtccactgcgggggctgcctccccatcgggtcctaacagctctaagactgggagtggagttcctggaggtgtggggaggggggcgtgttttcaatttagaaaaatctcagccagctcgagccgagagagaatgcgaaagaggaagttcggaaggagcgaggaatggggtgggtggcagcgggggcggctcagtcgctgtcgctcttgtccaccagcacggcgtccgactcctcggtgatctccagcagcgcgtgcacgtcggggctgctcccgcgccgcaggtcgccggcctccccgcgctccgcgccgccctcgtcgtcgtcggcgcccacctccaccatctcggtggccttgagcacttccacctggccctcgcggatcttcttgacgtggaaggtgaagggtggcaccttgtagaccgcggtcttggagcgcgcgtacaccacgtggtcgggcgtgaaggatttgcgcaacttgtcccgcgacgtcttcagtttctcgcgccgctcggcgggcaccaggcgcgtgcccagcttgttcatgcgcttctccagggtgtgccgcgtcttctccaggttttccttggtcttgaggcgcgtcttctccaggttctcgcgggtacgcaccttggtcttctccatcttctccttggagaaggccttcttgaagtcgtccacgcgccgcaggccgctgcgcttgatacgctctgcgcgggactcctcaataacctcctcaacctccaccgcctcgtccgacgaaagctccagcgccgctgcgtcctcctcgggccgctcgccctcgcccagctcctcgccctccttctctggcagcgcctccgactctttcagcgatttgctgatgctcagtttggccggcagcttcacttcatcctaagggaagaggagaagggacatgagaggcgtcggaggaggcggatgtgggcgagcctgagtcagggtggtgacgatcctggagagaggggagcatgggacgctcgtggtccccaggaaactggcgggcgctcaataaatgtgtgtaggctcacgcctgtaatattagcgctgtgggagaccgaggcaggaggatggcttgagtccaggagttcgagaccagcctgggcaacatatcacccatctccggccccccaaccccgcgtcgccattctttctctctctctctccttgtttttttttttttttttttttttaaacggagtctcgatctgttgccgaggctggagtgcagtgggcgcgatcttggctcaccgcaacctccgccacccgggttcaagcaattctcctgcctcagcctcccgaatagctgggattacaggcgcccgccaccacgccggctaaattttgtatctttaatagagacggtgtttctccatattggtcaggctggtctcgaactcccgacctcaggtgatccgcccgcctcggcctcccaaagttctgggattacaggcgtgagccactgcgcccggcctcgcgccgccattctctaaaaaacatgtgtgttgaacgaatggtgactaaacagaccgcgggagcaggggaccaaacttcgggtcggagatggggttgcgtaataattgcacttgggctaaaatctctgtggtcgtccaaccctgtcctgatccctttccacccgtagatgatattaaaccactacggccctcgggagacacagctccactttggaaatgggcggagcgccctctggtgccgcaaatcgcacactgcccgagccaggccgaaaagcaagtggtgggagtgtctaagttgaaagcgggtaggggtttgagcccacagctgcacctacccacccaagcaggtaaagtaaaggaagtgcatttcctagactcaagctatttctttttttttttttttttgagatggagtctcgctttgtcgcccaggctgcagtgcagtgacacgatctctgctgactgcaacctctgcctcccaggttcaagcaattctcctgcctcagcctcctgagtagctgggactgcaggcatgcgccaccacacctggctaatttttttgtatttttagtagactcggggtttcaccatgttggtcagattggtctcgaacccctgacctcaaatgatccacccgccttggcctcccaaagtgctgggattacaggcataagccactgctcctggcctcaagctatttcagaaccagccttagagatggagaactgtggtccaccctcccccacctccaccttctttgactccttcatactgtttggctccaccagtggtcattctccccctcccccacatttagaaattgatattggaaagaggaagaagctggctgggagccacggacatgttttctccccagtctggacatttcttctggttgtgacttccctactttgggatagaagagagattacttttcaattcttgctttccctaccccctgcccccagcacaaagcctgagctcaggggtctaggagtaggatgggtggtctcagattccccatgaccctggagctcagaaccagttctttgcttttctgtcttctccttggaggacttagcaccagaactgctttccattccgggaagattttccaagatcttgactctggccaacatttcagaatctctggatcactccctcccccacctccaccctcatcagagagcaggggaggctgagcacagaaagggaaagggcagaccaagatcatcaataggatctctttggcccagactccctttagtgacttcaaatgaaggaacgagagatagtcgcttttctaaagggttttctgaagaccatttcccagaattataagaaaaatcctgtcccctaagaaattaaggcaacataaactgagtcctctcactgacaccacacacacacacccctatacataggctgctcggtatctctgcaccacctgctacagaaattccttccccagcccccaacctctttcctcttccctcccatcaacatccccccagagtttcctggtttacactgaaaactaggaacaccctctcccaacttccttcccttcttgtcaatagcattagcagggacaaagagggaatgctggctccacctcttctctcatctgggcatcagctctgctgggcaccaagccacctccagctctctgttacccaactacacctcccagcaggcaaggtgacctgggcacagggcatgctgggacttgtagtctctacctgccatagacggcttagtgcagatcatgggcaatcctagggcattttgtttatccctctgcctcttatcattcactgaggcattgaagggtgttttccttgttctgagtgtaggagagtctcaacttctctttgcattccctctgatttccagtcattcactttggggctcctacaatcacccttaccctgcctgctactggagtgcatatcatttaagacttatacatcattgtaggatctaaaccctcttcatccatctccacccagaatttacctgcagccccagtatatatatatattaaaaaaaattcagctctgatctttccttcataacctcccagacttaaaaacccacccacgccccaccaaagggtggagagagcccctcctttcactaaactcagacaatgtgaataggctagggagggattaagggtgacaggcagggaatagtcaggaaacagccccagctgctggaaaacaaatccactttgtctctctgccctacccccagcatcccccgcttctcccctacccctgctgcctgctccaccccacccctaaaggctgagctggctggttttcctggcctgtggcttcctagataaaggtctttgccagctgaacttggaagtgaatgggactggggagagagctgcagacttcttatagccaatgccatcttcctagtgcctcatgaaaggtctcaaactacaacataaggaagcaatcctagtgagaggaggtttttgttttttagtttttttgttttttttgagatggagttttgctcttgctccccaggctggagtgcaatgacacgatctcggctcaccgcaacatccgcctcctaggttcaagcaattctcctgcctgggcctcccaaatagctgagattacaggcatgtgccaccacacctggctaattttgtatttttagtagagacggggtttctccatgttgatcaggctggtcttgaactcccaacctcatgtgattcgccctcctcagcctcccaaagtgctgggattacaagcctaagccaccgtgcccggccttttttttttttttttttgagacatggtctcactctgtcacctaggttggagtgcagtggcgcgatctcggctcactgcaacctctgcctcctgggttcaagcagttctcctgcctcagcctcccaagtagctgggattacaggcatgcaccaccacacctggctagtttttgtattttttggtagagacagggtttcaccatgttggccaggctgttctcaaactcctgacctcaagggatcctcccacctcggcctcccaaagtgctgggattacaggcacgagccaccgcatctggccatttttgtgtttttgtttgtttgttttgagatggggtcttgttctgtcaaccaggctgaagtgcagtggcatgattacaggtcactacagcctcaacctcctgggctctagtgatcctcccacctcagcctcccaagtagctggaactacaggcgcacgccaccatgcccagctaatttttgtagtttttgtacaggcagagtctcactatgttgcccaggctggtctcaaactcctgggctcaagtgatccccttgcctcggcctcccaaagtgctgagatttctcgcatgagccactgtgcctggccaaggggaggtttattcctggatttagaaatctctccagaccagtaagggatctgggggctctaaccccattcatcgtaggcttcccctggagtgacggcttacaccataggagctgccttcttggtggaaggtcaggggacaggagacgaaacaacttgagctgaatcctgggatgatgtccaataggctggctctggagagggtatttcaccattagcttttcctctccactccaggccaggtttcccccatgactcacagccttggagtgctgtcttggtcccacccatctgcttgctggtacaaccaccacaaacacaatccaaaatcatctccctccaccctgggcacacaggccaggcacccttgtcccacccctacttctctggcagagctcctaagccaaaggaaggacctcaggggatggcaaggagggacggctctgcttgttctgtttctcgtttttattaaacaaaaccaccactcccaataggcttggtttccagagttacctttaatgaccagctctgaacaaaagcattacagttccccctgccctttgccaagcacacatagctcctcaatcctcgatggatgcagaggagccacagggaggctcccagcctcttccactccaccccccaaccctgctgtctaaactcgagatctggcttaggaagatttttataagattataatgtcattgagcacctattacacatctggcccttggccaggcacttcacatttgttagggagaagggacagatgccacatgggtctgggtaggaggctctcttgacttaaggctgaccagctctaggtccccaaccactgcctgggaatggctggaggagactggagaggtaattcagagacccaggatctgcttagagtgtatgttagaagagggtgcagaggaggggagaggtgaaggggagagaacgtctttaaaattcaggacctctgctagaggttgctaagacaaggagatgagagaccccaagggcagaagtgtccctcccttctgctctagcgtgcattcttggcaggggtgaaattgcatccaaaagggtgaaaactgattcttggagattgggaggggacttagatatcacaatgatttgtgccactcccaagagccacagtacataaacagatatacagtttatctattgttttaacatttcgtgagggagatgaacagcttggttaaaaatatctgaaaggggccgggtgctgtggctcaaggctgtaatcccagcactttgggaggccgaggtgggcagattacgaggtcaggagatcgagaccattctggccaacatggtgaaactccgtctctactaaaaatacaaaaattagctgggtgtggtggcacgagcctgtaatcccagctactcgggaggctgaaccagggaggtggagattgcagtgagccgagatcgtgccactgtaatccagcctggcgacggagtgagactctgtctcaaaaaaaaaaaaaaaaaaaaaaaaaaaaaaaaaaaaaattgaaagggccaggggtggtggctcatgcctgtaatcccagaattttgggaggcggggcagatcacctgaggtcaggagttcgaaaccccgtctctaccaaaaaatacaaaaactagctgggtgtggtggcacatgcctgtaatcccagctacttgggaggctgaggcaggagaatcacttgaaccgaggaggtggaggttgtagttagccgagatcactccactgcactccaacctgggtgacagagtaggactatgtctcaaaaaaaaaaaaaaaaactaaaaggtctgtatatgggagtgattatgaaaacaacaacaaccatcaacaacaaaaactggctgggtgaggtggctcacatctgtaatcccagcactttgggaagctgaggtgggaggatcacttgagccccaggagttcagaaccagcctgggcaacacagtccaaccccatctctaaaaaaaatttttttaacattttttttaagttgagaaacactctgctataggaaggccagaggtcctgagccagagccagctagaatgtccccctcctggcatctgtgagttggcagcttttgggcaccccacccaaggcaggatctggcaaacataagcgatctctttgcaaagcattttctaaaagaaactggagaaaatacgtgtaaatgttttcctcagctgcagggagtgggtggagagggcacagaacagaccccaggcctgagcctcatgatggccctctccaaagaggctttgagccaaactgggttgtccctcaggaggaggcagcagggggaacggcagaaccagaagccatgcgccttcatgctaggcagccttcgggtgcagcttaagtgtgggggagcatttactactaaaaacagaaaccaagaagtggggaggccccttccattcccctcccatccccactgtatacatcccattctcctgaactttgcataacgccagtgttctcacagtacccggcacccgtccacagtgggcagtgactggggatggtggccctcctggcagtgatcaccactaggctgtgggctgacagtggactgaagagataccccacgcccacagaacgggatccgggagaccctaaacactcccaccggctgtcagctcctctggggtgggccggggcccaggctctgggtaatatggcagtgccctaggcgtctggtcaaaaggtgggagctcaggcactgtctcaggcttcaggtcaaagggctcagtctcaggcaggtcaaaaggcacgatcttgggtgtggccaggtcagagggtgcattcggcttcttcttgggctaagatgaggaaaaggggtttaaatggggcttggggtgggtgcaaaaggagttgagaaaaaagggccttggtggcatgcagagtaggggctggtgagtagggaggggagcacaatgtattaggatggaaataaaccactttttttttttttttttttttagaaatgggggtcttgctctgttgcccaggctgtagtgcagtgcacaatcatagctcactgcagcctccaactcctgggctcaagcaatcttcttacctcagcctcccaaatatctaggactacagttgtgtaccatcaaacccggctaattttttttttttttttgatagagacaaggtctcactatgttgcccaggctagaaactattttattttatttttttgagacagagtctcactctgttgcccaggctggagtgcagtggcacgatcttggctcactgcaacctccacctcccaggttcaagtaattctcctgcctcagcctcccgaatagctgggattacaggtgcatgctaccacgcccagctaattttatacttttagtagagaccgggtttcactgtgttggccaggctggtcttgaactcctggcctcaagcgatcctcttgtctcggtctcccaaagtgctgggattacaggcgggaaccactgcgcctggactattttatttatttttttgagatggagcctctctctatcgcccaggctgctaaactgtagtgcagtggcgtgatctctgatcttggttcaccgcaacctccgcctcctgggttcaagcgattctcctgcctcagcctcccaagtagctgggattacaggtgggtgccaccatgctcagctaatattttgaaattttagcagagatagggtttcaccatgttggccaggctggtcttgaactcctgacctcaagtgatctgccctccttgggctcccaaagtgctgggattacaggcatgagccaccatcatgcctggcctagaaactcattttaaatgcttcatcaagagggccctgggagctgggcacagtggctcacgcctataatccctgtaatcccagcactttggaggccaaggtgggtggatcccttgagcccaggagttcaagaccagcctcagcaacattgcccaggtctctgcaaaaaatactgttagtggggcctgttggcacatgcctgaaatttcagctactcgggaggctgaggcaggagaatcacttgaaccagggaggtgaagtttgcagtgagctgaggtccagccacttcactctagcctgggcgacagagcaaaagtctgtctcaaaaagggaaaaaaaaaaaaaaaaaaaaaaaaaaaaaaaaagaggtccctggggccaaaaggggtggggcaaactcaagcccaagaattaataaacacagcttcaattgagcccctcccttcctccctctacaatattccccagtcccattcttgggcttccatctccaatccttccccagccataatcataggaagactatggaggctactaggggtggataaggagttttctaaggggctagttgttggattataactggggaggctcagatgagtaaatacaaaggcacacaacttcactgtcttcagagtcagactctgccaatcccagttttgtggttgttgtttttttttagacggagtcttgctctgtcacccaggctgtggagtatagtggcgtgatcttggctcactgcaacctctgcctcctgagttcaagtgattctcctgcctcagcctccctagtagctgggattacaggtgtgtgccaccatgcccggctaattttttttgtatttttggtagagacggagtttcgccatgttggccaggctggtcttgaactcctgacctcaagtggtccacccacctcagcctcccaaagtgctgggattacaggcatgagccagtgtgcccagattaatctgttttcattcttccctggggtagggtggacacaggatgctaccccaaatgaggagagggataggcatggaagagggacatcctggcaatttccctttggccacgtccccaccttctgtctcccttgccacccctccctcttgctaccacttaagatatcatacactaaaatgcacagagaaatcaggatccaaaaccaagctctatttttttttttaagatagagtctctctatgctgtccaacctggcttcaaactcctagtctcaagcaatcttcctgcctcaacttattgagtagctgggactacaggcacacatcactgtgcctggcaaaaccaagctatttttatgacaggtgagcctatgtcctgggacctctggacctctgcggcagcccccaactctctctcctgaggggctgagttgtggaagactataggcttcttgctttgagcaatcagatgccaggcgagagggacacttggcggcactattggactcaggcaatagcagtatttgataaagcctgtagtctcaaaaaaacaaagcagcaggtcccaacctcccctgcagggtacaaggaggaggtgggagtggcagagaggctgaagagaaagggaaacaacatgtccctctcctaggtatgtgtggagtccctgccagggcacaccacggctgaccaggagctccactcctcccctacgcccctcccctccccaacacccctcctttcccccacttttctcccctacacccctcccctcccctacacctctcccctcccactgtcaccaggccaggtgaccacacattgcctctacttcagcacttacaaggctaagcagccaatggccaccaatgctggccactcatagccaacgccacacacacaaacacccatacacacgcaaagcagccccagggccaggactgtgcaactaactccctcagcaagtgtcggagccacagctagccctagctttgtcagggctagtcttcactcagctttctgctgcagagcccagaacggaaggagggggtggggagcagtgagtgtagcggaagggtacacctgggttctggctccagtttgactcccaatcacttgagtgacaataggctagtgacttcccctctctgggcctcagcttcctaaaccacaaaatgaaggagttgaagttgattatttgcaaagtgtcttctagctcaagaagtgtataatgaggccgggtgcggtggctcacgcctgtaatcccagcactttgggaggctgaggcagacggattgcttgagctcaggaattggagaccctgggcaatgtggagaaaccccatctccaccaaaaaatacaaaaattagctggatgtggtggtgcatgtctgtagtcctagctacttgggggcctaaggcaggaggaatgcttgagcccggacgacaggggctgcagtgagccgtgacagctgccactacattccagcctgggcaacagagtgagaccctgtctcagaaaaacaaaacaaaacaaaaaacaaaaaaaaagaaaaaaagaaaagaaaaatttaaaaaatgctaatgacagaatgatgaaatattcacaatgttatatttccaaaaaaaaatggcccaagccactcctacttctgaggttagttgcttagcaataatatcccctcccctcttgctatcagttgcccactctttgctgtctcctcatgcttttgactttgatctttacaatatgaaaaataaaaataaaaaggccgcgtggctcacgcctgtaaccccagcactttgggcggccaaggcaggagtatcacttatgcccaggaattcgagaccagcctaagcaacagtggggaccctctagaaaaaacatttaggctgagcacagtggctcccacctgtaattccagcactttgggaggctgaggcaggtggatcacctgaggtcaggagttcgagaccagcctagccaacatggtgaaaccccgtctctgctaaaaatacaaaaattagccaggtgtggtggcacatgcctgtaatcccagctacttaggacggtgaggcatgaaaattgcttgaatccaggaggtggaggttacagtgagctgagatcacgctactgcactccggcctgggtgacagagcaagactctgtcaaagaaagaagagagagagagagagagagaaaagaagaaaagaagaaggaaagaaggccggaaggaatttaaaaattagctgggcatggtggcttgtgcctgtagtaccagctacttgggaggctgagatggtgagatgggaggattgcttgagcctaggagtttgaggctgcagtgagctatgataccaccactccagcctgggctgcagagctaagatcctttctcaaaaaaaaaaaaaaaaaaaaaaaaagggagggaggaacccagggatagcatgatttcctttcgtcttgggaatacccctaaaaataccctccctgctttggacccagtgaccaggaaaaacaacccaaactcagtttgggaggaagggatgtactatgcatactctccatggccgctgggttttagggatgaaagggaccaaagccctgggttgagaatatttttggacaaaggtttggggttcttctagagcaaggtagccctaatttgcgttgaatccaggaaagaggtacaggttggattgcgatttggggaggagaagccatcaggctctcgttccagccctggtgccctaccctttaatgcccatgagacacctaatcccttaaatgcttcctggcccttatccccaggcacttggagcaggtctgatgggcctttgctgctggtccatatgtaggtcactgactttgcctcctcaaaactgctccagaacacatttttagtcatgagccgcatagcaacgtttcagtcaacagacggcatacacaaccgtggtcccataagattgtaatggaggctggttgtggtggcttatgcctgtaatcttagcactttgggaggccaaggcaggtggattgcttgaggccaggagttcgagaccagcctggccaacatggtgaaaccctgtctctattaaaaatacaaaaatattagccaggcatggtggctcacacctgtaaatcccagctactcggaaggctgaagaagaacaattgtttgaacctgggaggcagaggggttgcagtgagccaagattgtgccactgcactctagcctgagcaacagagcgagaacttgtctccaaaaaaaaaaaaaaagattgtagtggagataaaaaattcctatcacctaataacattgtagccatcataatgtgttagtgaaatgaattactcaagtgtttatggtgattgctggtgtaaacaagcctgctgcactaccagttgtataaaagtctagcccatacaattatatacagtacataatacttgatattgataagacatgactgtgttactggttatgtatttactatactatactatttttttgagacagtcttgctctcttgtccaggcacaacctccatctcccaggttcaaacgattcccctgcctcagcctcccaagtagctgggattacaggcacccaccaccacacccacctaatttttgtatttttatttagagatggggtttcaccatgttggccaggctagtctctaactcctgacctcaagtgatctacctgcctcggcctcccaaagtgctgggattacaggtgtgagctaccgtgccatggctattgcaccttttctatgtttagacacatttagatacacaaatacttaccattgtgttatagttgcctacagtattcagtacattaacatgctgtataggtttgtagcctaggagcaataggctgtatcatatagcctaggtgtgcagtaggctatactgtttaggtttatgtaaagttactctatgatgttcacacagtgaggaaatggcctaacactgcatttctctgaacatatcccagtcattaagcaatgcgtgactgtatttcctttttttttttttttttttgagaccaagtttcgctcttgttgcccaggctggagtgcaatggtgcgatctcggctcaccgcaacctctgcctcctgggttcaagtgattctcctgcctcagcctcctgagtagctgggattacaggtatgtgcaaccacgcctggctaattttgtatttttagtagagacggggtttctccatgttggtcaggctggtctcgaactccccacctcaggtgatccgcccgcctcagcctcccaaagtgttgggattacaggtgtgagccaccgcgcccagccccgtatttccattttatccccactttctggatctaaaagagccctactctccaaattgttgcctggagggatggttaatgggtacaaaaatacagttagatagaaggaataagatctaacgttcagtagcacaatagggtgatagagttaacagaaattattgcgtatttcaaaataattaaaggagtggaattgggatgttcctaacacaaggaaatgataaatgcttgatatgacggatactctaattaccctgatttgatcattatacattgcatacttgtctcgaaatatcacatgtactccaaaaatatgtacaactattatgtatccatagtaattaaaaataaagccttttaagtttaaaaataaacaaactggatgcacgtggtagctcatgcctgtagtctcagcactttgggaggcccagacaggagaactgtttgaacccaggagtttgagatcagcctgggcaactaagtgagaccccggactctacaaatatgaaaaaaaacaatttgccgggcacggtggtgggcacctgtagtcctagctactcgggaggctgaaccaggaggatcacttgagcccaagagttcgagactgcagtaagatatgactgtgtcactgcactccagcttgagcaacagagtgagaacttgtctgaaaaacaaaaccaaaaaaccccaaaaaacaaattgttgcctggaagaattggttctttaatgatcatagttccactcatctgcatggcattttattttatttattgttgttattattattattattattatttttgagatggagtctcactctgtcgcccaggctggagtgcaataacacgatctcgctcactgcaacctccgcctcccaggttcaagccattcttctgcctcagcctcccgagtaaccaggattagaggtgctcaccaccatgcccggctaatttttgtattttagtagagaggggtttcaccatgttggccaggctggtctcgaactactgacctcaagtgatccacctgcctcagcctcctaaagtgctgggattacaggcacgagccacctagcccggcctctgcatggtattttagagcaactgcctctatattcacaatctggcctgatcgtcctgcaaccctcagtccattaactcctataactagtagaattcacttctctcatttactagctgttgctagccaagtgtcgcctgatagaatgcaatgtcaaactgctaggttttgtttgggagacagggaaggaaatgccagagaagggcagtaatgactcagaagtgagtttaagatgagggctgtgataccttggggtgggaggtgctgaatttcgtgtgtgtgtgtgtgtgtgtgtgtgtgtgtgtgtgttcaaatgcaaacttaaagctgtgaaatcattaagtctagaagttccctgaatttggggtggggccatacaagggattccctccttttctccccaggaatagggtatggaaggccagatgtctccatcccacaacgggggccttcccatcccttggtgttctctgccccgcccccactgccacatcatcacctcccacccctgtagtggggaatacagcatcccttcccctatggcccctccagagaattcacaccatcccaggaaactttctccaaatctctgtctctttgcctggccacccaacatcctcccccttcagccggactttaccataaatgctgctgcccccaatcttccctaataggcctgccaaggcacagagctatttttacctccttcccttctcaggcctgcagacctctgggaggagcaggagcagcctctgctttcctccagcagccgggtccccacctggaacatctgctctgcagctcagggaagttctgctttcccaagcctcaccccatttgctggaatcttttccttacgtctgaagtcttccccaggttgggaccatttcagttcttagttattccctctgtgggtttgggactccatttgagctactcttactacctcaactctctgtcacccactggccttggtttagtgcagattcatttgaagccacctgtgattagaacacattccctcccaccccctaaaatatagacatatccctgcagattgctggagagggcagaacagagggatgccagtggcctctgcagataagtctttctccctccatacctttccctcttctctcagaatctccatctttggcatagggaagtttacctccaggccaagacttttcccaggttctatggtctgggatagttagcgtgagaagggtcacccctcgagctcttcatggtggctctcggccacaccaggctctggaggaaatatagagctggcttgctgtcccagacccctgtcttgttccgctcctctcaatgtccccagtactaagcaggtctcttaaaaaacgtcaaaagcccccctctcatcctgcgtcctccaagcagttagactaagtggaaatagctctgggcaaacattttctatctaaatagtgcttaagtaggggaagtaaagcttttaaaagccacgtatatgcctcctgggaggagtctgtcatccgtgggtaagggtggggagggggacaagtgccacttctgcctctgtcccaccacctcagataggtaccagctgacccacctttctgtctctactcttcccagatacttgtcctgatttgcatctatcttaactcctcctggggaaaccaagccaaggaccccctcgcctcaccccagatggtcactcagaacccggctcgaccaggccccagagcagtcagcagagccacaactcccggaaaggggtcttctaacttggagggtgtgggaaatccagccttccctttctttccattcccttcagcagggagaggaaggggagaggggagcatagactaacccccctgccccacacgatcccgcctccctggggttaggagcatcagcaggcctttgggaggcggggaggagccaggctggaacacttgccgcccagcccaaaatctcatccccgatggcactgcggaagcggcgtggagaggagcagcatagaaacccgagactcccaggtttattgggggttatgatccaaaagctacatttttatccaagtgtgaagaatggggagagctgcaaagaaagcaacaagtggccccgggcggagccggggggtgggggcgccagcctcctcccgccggctgcgctgctgcgcctggcccccgcccccgcaggcatgcggggtgattcacctcgcccagactgcgcccagaccgccggaccccgcaggggctgtccacccactccaccagcccctcttgcactcctgacgcccactcttccccgcccagccccgcccgcttccaggaggcccagggtgccagcgcgccgcgggtgagggtgtcctcaagggcctgaaaatgcctggtggccaggagcagagagcagcgaggggacaggggtgggccgccgaggccgatgtgggggcgcgggggcgcagggtctggggaggaggttggcggtcgcgttccccgcttggcacagcccccgctggtgcgtgcctgagccctgaatcacccgctatatcaggcccgcaggcgcagaggccccaggcccgggccccgcagccagtgtccgcttacagcggaccccaacgatcgcgagggacccctgactttcctagaaacttcccccaagtaggaagaagtttgacagagccaattagggagggagcggtctgcgaggggcagcgtcctcgagtccacccgctaattcggttctgctacaagtttgggacccgagggaaggatctgagtggggaggtgcgaggtgcagagcgcgcccctctacgcgccccaggagtccgccgctccctccaccccatcctaccccacccaaccccaccccagccgcgctcaccggaaggagggtggatctgccgggcgcccgggccaggctgggaggggagcagcgccacgggcaggtctccccaccccaactcccaggcaggggacgcgggccgggcgcgggagctctgggcgccttccgccctgtgggctcacctggtagatcatgactttaaagttgcggcgccgcagcagctcggcctcgttgacctccagcttcttgatctgccccgcctggcgctccaggctgccgcgcacggtcttcacgttgacgctgaccttgcgcaccttctccagcagcttgctcaccgtattgctcgtggtggcgtgcgccttgcccagcttgctcagctcgccctggatgctctgcactgcgccctccatctccgcctgccgctcctccagctgtgcttgagtcagctggatctggtctacggccccgatgattttgtccaggaggctcagcaccagcacgccgttcacctggtccgacttgatcagctcttctgagccggcccccgacggctcctccgctgcctgagccccagcggaggaaggctccggggcctcggcgtcggggtacccgggaagcggccgctcgacaatatagagcgtggggtcctccatggctacccggagccgtgcgggaccggccgggtggggctggagctggagcgggagacccggagagaagcaggagcggaagggaggagagctagcgggcgagagcggagagcagaggaaactcgagccacgtccgtgcgcaccgggacagcggccagaactgctgggcgggggatcggtgagctccccagctcccgggccaaactccggagtctgatcgctgattggctggccccaccccagaaagggagggaccggggcagaaggggagatcgacgaggcggggcggcggagggggacccaagagccgagcgccccacccttcccgggatggttggaatagttggagcgggagactagggcctccgctggcggcgggagcgggacgggcggaggaatgcgagctgaggaacggaatcaggttctaagagtgttgctctctgtttccctctcacttgaattgctcatccgaaaatcctcaagatctgggagccgggtggaccaggagattctgaaattataggcaaaatcttgtatttgcctttacctagattttgagcacaaaaggacccttgccctttacaatattttctaagaggcctctcggatttcctcatcaccaaccccaaccaggttactaactcaggggtaagcttagggggttgtttgtggggggcggggggagaaagagagaacgtatttggggtcacggtggtggtgaagggctgcgaagctcctctaagttctttttagaattgccctaacagagtagaattaagatgggcaatcaaacggaaaataaagcccacctcccaacccccctttctgagacagggtgtcactctgtcacccaggctggagtgcagcggtctgatcacagttcactgcagcctcgacctcttgggctcaggcaatcctcccacttcagcctcctgagtagatgagactataggcgcttgccaccacgcccagctaatttcaatttttatttttttcaatttttatttttttaagagacggggtgtacactattttgaccaggctggtctcgaactcctgagctcaagtgatctgctggtttcagcctctcaaagtgctgggagccaccgcgcctggtgtaaagccctttttaaaagcccacctctcttaggccaggcgcggtggctcatgcctgtaatcccagcactttgggaggcccaggcgggtggatcacgaggtcaggagttcaagaccagcctggcccaagatggtgaaaccccgtctctgttacaaatacaaaaattaggccaggcgcagtggctcattttgggaggcggaggtgggtggatcacctgaggtcgggagttcgacctcagcctgaccaacatggagaaaccccatctctactaaaaatacaaaattagccaggcgtggtggcgcatgcctgtaatcccagctattcgggaggctgaggcaggagaatcacttgaacccggggggcagaggttgcaatgagctgagattcgcgccattgcactccagcctgagtggaattctacagagtagaattcctcttttttccaaaagctttttcaatccttagtagaaggaatttaaattactttaatacatttctcctaaattctaaagtaagttggtaatctgccagttggtaatccactgtctgagtgcagacagagtgagactctgtctcaaaaaaacaaaaaaaacaaaaacaaaagcaacccacaaacccacgtctcacctctctctaaaactcacctttccctgtgttccccctcccaccgccccctcagaggcagctgacaccaatctcagtgagcaggatctaggagtccatttctctttcaagattccagggactaacagtaagccatcggagagaccatcaaatcccaccccctcatttgacagacaggaaaaggaaagcctgcagaagacaggtggcttgccagagatcactcgcaggttagtgttggcattggcacttgaacccaggtctggactcctgctttcatgctctttccaccttctgctctaagccttccactggggcagggagacaggcacccacagccactccccaactcccatgtgctgtttcagaagattaaccaaagcatattttcatccatgctgggtacaagggagcaggcaattctgagcaggcccaaggagggtccttagtgcagaaagtccagaaatagggaggctgcccatcctcccccattttgctgtctagcacagcactggtgctgtgagtgtctgaagtggcgccagctccctttcccacagaaaagcggcaacccttttccctccttaggaaaccacacttgggtttccccagctggctggatgatggtcctggcaaaaggtcacttctagtctggtatccattatcattaggaagagtgaaaaactggtctatggggacccagggcctcctcaacccagacagagaacccacaaactcagaaaggagaccgacagtgcagggactgggttagtgccctaacaacattgtagggttttttaagggtttacaacaccatatttgttatccgaaattctcatagaaaatggagccatcaactagggctgtttatcaggttatcctgaagtactgtttctgctagaaaggcaagatacgtggttactggtaacctctttttttcctttttttttttttttttcttgagatggagtctcactcttttgccaggctggagtgtagtggtgcagtcttggctcactgcaccctccacttcctgggttcaagcgattcttctgcctcagcctcccgagtacctgggactacaggcacgcaccaccacacccagataattttttttttgtatttttagtagacacggggtttcgccatgttgggcaggatggtctcaatctcttgagctcgtgatccacccaccttggcctcccaaagtgctgggattacaggtgtgagccactgtgccccgcctttttttttttttttttaagacagagtctcactctgttgaccctgcagcctcgaactcccgggttcaggtgatcctcccacctcagcctcccaaatagctgtgactataagcgcacaccatcacacccagctaatttttgtattttttgtagaaatggggtttcaccgtgttgcccacgctggtctcaaacacctaggctcaagggatccacctgccttggcctcccaaaatgctaggaatacaggcgtgagccacttcggctttgtgttttttccaactttttttttttttttgagacaaggtcttgctctgtcatgcaggctgagtgcagtggcacaatcacagctcactgcagtcttgacctcctggactcaagtgatcctcccacctcaccctctcaagtagcttggactacaggtgtgccaccacaccgggtaccctaacacttcaataactgttttctcacaaacaaatggctttctcatttgaggctcaagtagaattaagctagtatataagatcatatatacacatataactgctagaactggcagattaccaacttactttagaatttaggagaaatgtattaaagtaatttaaattccttctactaaggattgaaaaagcttttggaaaaaagaggagtgacagtagagaaccttataggaccttcatttcttaagtgtcccataagatccttagatgatgatgattattattattatcatttttttttttgagatggagtctctctctgtcacccaggctagagtgcaatggcacaatctcggctcactgcaacctccacctcccgggttcaagcgattctcctgcctcagcctcccaagtagctgggattacaggtgtgtgcccccatgcccagctaatttttttttttttttgagacggagtcttgctctgttgcccaggctggagtgcaatggcatgatctcagctcactgcaccttccgcctcctgggttcaagcgattctcctgcctcagcctcccaagtagctgggactacaggtgcctgccaccacgcctggctaatgttttgtatttttagtagagacggggtttcaccatgttagccagcatggtctcgatcttctgacctcatgatccgcctgcctcggcctcccaaagtgctgggattacaggcgtgagccactgtgcctggcctcgcccagctaattttttgtacttttagtagagacggggtttcaccaggttggtcagcctggtctcgaactcctgacatcaggtgatccacccacctcggcctcccaaggtgctgggattacaggcatgagccacagcacccggcctctaaaaaattttatctctatcccagcaactagtttcttttccaggagacatcaattattactatattctcttttttttttttaggtggagttttgctcttgtttcccaggctagagtatagtggcaccatctcggctcactgcaacctctgcctcccgggttcaagcaattctcatgcctcagcctcccaagtagctgagattacaggcatgtgccactacgcctggctaatttttgtatttttagtagagaaggagttttaccatgttggcgaggctggtcttgaactcctgacctcagatgattcacccacctcggcctcccaaagtgctgggattacaggtgtgagccaccatgccaagcctattattactattctcttgcggaatcttctatagactatttctgcatatatgatcatacatatatatatttcagcactttcctgttttcagttattaatatgttttatggatagttccatatcagtacatgtagaactgccttgttttccaatgtatacgtctactatatttgtttaaccagttccctatcaatggacatttacagattacaatttaaatctcatgggggaggagttgctgaagacaagtgggatttttttgtttttgttttttgcttttgaggcaggatctcattctgttgcctaggctggagtgcagttgctcaatcagggcttactgcagcctcgaactgctgggctcaagcaatcctcccaactcagcctccagagtagctgggaccacaggtacacaccaccacacctggctaatttttaaatttcttgtagagacagagtcccagccatggggttttgccacgttgcctaggctggtcttgaactcctgggctcaagtgatcctcccgtcttggcctcctgaagtgctgggattacaggaatgggccactgtgcccagcctcatcaggaaagtatttctataccacttcttcaaacaggaatgtcagaatttgtggatgagtcaagttatgtcccaggggtagtccagtgaatacatctctgactcatttaatgcctccttaatggatgatttctgtaaaagggccctacccctgcatgcctatgttggagaaaaatctgcatcaacaagtttctctcacattccttttcttactaaatgccagctaagtccaacagggggcatgctgaggcatattgtactagctccaccagcacagatgccgcaaactggagcagagcagtcctttccagagcatttcactccattccagtgaaaataagcagtttctcttcatttgtaactgcattcagcatgccattgcctgcattcagggttgttggtttgcattttccattgctcactctatttgcttgctgaaaggcacactgttccattgtgtgctttcagccactgagacagaatccataaaagggatagtgaggtaaaagcaaacaacccctttggcccagaaaaaggacaccaggatgcaacatgtcagcagttagaatcttacagggtgctctatcgtattcttccatccatctacttgttcaataaaacatgactacttcgcactagccatttactgggctagggactttaatgaggataaatcaagtctagtccttttttttttttttttttttttgagacggagtctcactgttgcccaggctggagtacagtggcgccatctcagctcactgcaacctctgcctcccagattctcctccctcagcttcccaagtacctgggatcacaggcacccaccaccacatctggctaatttttatagagttggggtttcgccatgttggccatggctggtcttgaactcctgatctcaggtgacccgcctgcttcggcctcccaaagtgctgggattattggcgtgagccactgcacccggccttttttttttttttgagacggagtctcgctgtgttgccaggctggactgcagtggcgcgatcttggctcactgcaacctccgcctcccgggttcaagtgattctcctgcctcagcctcctgagtagccgggattacaggcacacagcaccatgcccagctaatttttgtattttgagtagagatgggttttaccatgttggccaggctggtctcaaacacctgatctcaggtgatccacccaaagtgctgggattacaggcatgagacaccacgcctggccacccccagcattttttttttttttaaagacaaagtcacattctgttgtccaggcttgagtgcagtggtgcgatctcagcttgttgcagcctcgacttcctgagctcaggtgagcctcctatcagcctcccatgtagttgggactacagctgtatgccactacacctggctaaattttttttttttttttttttttgtagagatggggttttgccatatttcccaggccactcttgaactcctgggctcaagtgatctgttcacctcggcctcccaaagtgctggcattacaggtgtgaaactctgcacctggccagatgcatagtgtctgacacagctgaaagctcccccccagcatagggaaagcagtcactactctcaggaagagtggggaagggttcacaggtgagggtaggtacaaaggagggggaaaggaccccctcccaaacccagtatcttgcggtgtgaaagggcactggggaatagccaagcactgctcatctcctcttatcatggttctgccataagtcttatcagtttacatttagggagatccagcaaagggtgtaatatgtaatatgttctgttcagttttggatctgtgctgggagagatcccagggagactgtgtgttttgttaataataaacagctgggacaaatgatgtgtcttcacattgggacaaccgtctcacatgggaggctagccctcagcagctggctcacagctgccacaaacaacagtgattttttttttgccagttttataggcactattcttgtctctctgatatacatatatgaaaaatgcctataatatttgtatgtttctctttctcaaaatcccttcctttctttgccttcaaatattaatatatagggtaacttccctgaaccagaaaacagtcaaaattatttattaagtgctaatttatgcatagtttggtgctagaaaccatccaaaggacacaaccagcacttttgctgtggagtgggaattttagtttcagagaagcagtgattcaggctaacaaacagaaaatacaaaaaaacaggagaagggggctgcagaaaataaagcaaaatacatacagttttaccagcgtgggcaaagtggtaaaaccccgtctctactaaaaatacaaaaattagccaggcatggcagcgtgtgcctgtggtcccagcaactcgggaggctgaggtgggaggattgcttgagcccagggggcagaggctgcagtgagccaagatcgcaccactgcactccagcctgggtgacagagtgagaacctgtctcaaaaaaaaaagcaaaactaagaaaccctagattccaccaattgtttctccttttctttctttctttcttctttttttatgttgttgcccaggctggtctcaaactcctaagctcctgcctttgcctccaaactgttgggattacaggcatgagccaccacacccagccttttctaattttatttgaactctgatttagcactgctgaccaatttatctttgagattcttccctcttagccttggacactgtactatttttatttacttgtcccatttgctagcttattttttcttcctttcattttctttttttaaatagctttatttatttatttatattgaaacagggtcttgttctgttgcccaggctggagtgcagtggcatgatcacagcttactgcagcctcaacctcccaggctcaagcaatcctcctacctcagcctcccaagtagctgggactacaggcatgcaccaccacacctgacttacttttgtatttttgtagagacaaggtctcactatgttctccaggctggtcttgaactcctgagctcaagcgatccgcctgcctcagccttccaaagtgctggggttacaggcatgagccactgtacccagctaattttcaaaaattgtcgtagagatgggatctcgctgtttcccaggctggtttcaaactcctaggctcggcttcccaaagtgttgggattacaagcataaactggtacatttggacaaaaaaaaaaaaaaagcttttaatactgctttaaaaggttaaacaatataactttattgaggtagaattcacataccacacaattcacctaaagcatacaattgaatagattttaccatattcacaatgttgtgcaagaatcaactttcatcagcccccagaaagcccccgacaaagaaaaaacactaaagggagactttatcctaaagaatgtttgcaaggaggggaaaaagactgttgcaatacggggagggagtctattgcaatagggagaaggatcggcccatagttctgcaaatgtcttaagggccagacctttttccttttatagagaggagtaaacaaagctagaaagaaccaggtgtagagaataggaggaaagtggcctgatgagagaatagatcagagaatgttttaccctgaggtcaggctatcctcaggaggggttgtgtgctggctcaggcccagtgagggtgggccagagttcagggcctggaggaagaagaaaagcttaaacaaaatgtgttattttttttttttgaaacggagtttcgctcttgttgtccaggttggagtgcactggcgctatcttggctcatagcaacctccgcctcccaggtttaagagattctcctgcctcagcctcccgagtagctgggattacaggcatgcgccaccatgcccggctaattttttgtatttttagtagagacagggtttctccatgttggtcagcctggtctcgaagtcccaacttcagattacaggcttaagccaccgagcccagccttttatttatttatttatttttgagacggagtctcactctgtcacccaggctggagtacaatggcgtgatctcggctcactgcaacctccgcctcccgggttcaagtgattctcccacctcagcctcctgagtaactgggattacagacacacgccatcatgcccggctaatttttgtatttttgtagaaacgggtttcactatgttggccaggctggccttgaactcctgacctcaggtgatctgcccaccttggcctcccaaagtgctgagattacaggtgtgagccaccacgctgaaccaacaaaatttgtttaatgagcattttgttcatcgtgatcagtgttgggaaaaccagtttagctggtcattcatgaggcagagaataagaatttgaagttctgtgtctgttcctgtcacaggtaaacaatggggggcatctgcgagtcacatggggaagggtggttcttggcagtaaacaaaaacataggggattcctttaaccttggatgttttccaagagcacagggctcaggtgaaattcaccactgttacctcatacccattagctgtcactccccactcctctcttccctgtcccctagcaaccagtaagttttaagtctctatagattttcctgttctgaacacttcatatgaatggaatcatacaatttgtagccttttgtgtctcgcttcttttacttagcatgttttcaaggttgatctatgttgtagcatgtatcaatacttcattcctctttatggctatattccgttgtataaatatgccccatgctgtttatccattcatcagctgatggacgtttgagttgtttccatttttttgtttttttaagagacagtctccctgttgcccaagctggtgtgcaatggcacaatcatggctcactgcaacctcaaactactggtctctagccatcctccttcctcagcctcccaagtagcttggactactggtcacaacaggctaattttttttttagacggagtcttgctctgtcacccaggctggaatacagtggcacaatctcggctcactgcaacctctgccccctgggttcaagcaattctcctgcttaagcctcccgagtagctgggattacaggtgcgcatgaccacgtctggctaatttttgtatttttagtagagacggggtttcaccatgttggtcaggctggtctcgaactcctgacctcataatccacccacctcagccttccaaagtgctgggattacaggcgtgagccaccatgccccgcctaaaccaaatatctttcctcaaaagctagaatgcttcttggcttatttctgttgatggtgggaccgtcctatcaaacaccagagactccaaccttagaattatatttatctcctctctttctctcatctactaaagcaaatgaaatcccagatcctgccttccttccttcattatcactcccctgtaattcccatttctgtgactgtctgtctgatcctgttgttaccagctgatggctgttactgtactttcctagtttgtctctgtgtctccaaccttttccttccaattcataatgcattttagaatgaaaattgatttgaaaaactgtaaatgatagtttggaaggtgctgggactagaaaaaaggagatctaacaggagactactgcaatagtcccagcaggggaagatgatcatttgaactagagcattacggggcacagagagaggactgatgggtgagcactatagcatgaaaaccattagggcttgatgaatgagtacatgtagatactgaaggagaaggaggagtctaaaatattacaattttggctgggtgcagtggctcacgcctgtaattccagcactttgggaggccaaggcaggcggatcatttgaggtcaggagttcaagatcaccctggccaacatggtgaaaccctgtctctaccaaaaaatacaaaaactagccgggtgtggtggcgcatgcctgtagtcccagctacttgggaggctgaggcaggagaatcacttgaacccgggaggtagaggttgcagtgagctgagatcacgccactgtatcccagcctgggtgacagagcaagactctgtctcaaacaaacaaacaaattggcaaataaagagaatcaatgaagcattaatcctaccttttctggccggatgaagtggctcatgcctgtaatcctaacactttgggaggccgaggcaagaggatcacttgaggtcaggagtttaagaccagcctggccaacatggtgaagccttgtgtctactaaaaataccaaaattagccgggcgtgcttgtgcacacctgtaatcccagctattcgggagactgaggcaggagaatcacttgggcccaggaggcagaggttgcagtgatcactccattgcactctagcctggtggacaagagtgaaactctgttccaaaaaaaaaaaaaaatcttaccttttctgtttggattgtacctctgtgtaaccaaatagcggctgggtgaaggaaagcacttatttataaaataatttcagctcataaataaagaaggaatgatggattaaaatgtcactattttgtagcctctagtgaaaaaatgagctaatgatcattaatgcccgctaaaactattaggcagaaaattgtggggaactctattatatcaaagtaacaactcaacccactcactaatctttgtatttatttatttatttttttgaggcgggagaatggcttgagcctgggaggtggaggctgcaatgagctgggcttgtgccactgcactccagcctgagcgacagagtgagaccctatctcaaaaaaaaaaaaaatttaagtatgatagcagcattgtggttatgtttttaaaaaattcgtacatttttgagatatatactgaagtatttacagatgatatgatatcacatctaagatttgattcacaataattctggcggaagtagatgggatataaatgaaacaagctggactatttgttgattatggttgaagctgggtgatatgtacatagggattcattatcccgtctctgccttctgtatccttaggttccacacccatggattcaaccaactgtggatagaaattattaggaaaaaaattccacaaaattccaaaaagcaaaatatgaatttgccaagtactgtgttgaatccacaaaaatgaagtgatgtgtgggcatcgtattaggcctaagtaagctagagatgatttaaagtatatgagaggatgtgcattaggttatatgccaatactacaccattgtattgtattgtattgtattgtattgtattgtattgtattgtattgtattgtattgtattgtattgtattgtatggtattgtattgtattgtattattttttgagacagggtcttgctctgtctcccaggctggagtgcagtggcacgatctcggctcactgcaacctctgacacctgggttcaagtgattctcctgccacagcctcccgagtagctaggtttacaggcacccaccaccacgcctggcttatttttgtatttttattagagacagggtttcaccatgttggccaggctggtctccaactccttacctcaagtgatctgcccgcctcagcctcccaaagtgctgggattacagacgtgagccaccaagccccgcctgaagtttcccataataaaaaatactaaggttgttttaaggatgaaatgtgttcacatctgtaaagggacatatcaaaatgtttgatacacaatgtgtggcaaataatgtgcatgacccttttccctttctctcacttgaaccaattcagaactggtgttcaaagagactgtttctgttaaacccattttgttgcacaagagaagagccccttcctttcaactttccagctggaaccaagaccagacctttcaaacaagccactttcagtaaacgcagtaagtgtttagcagctgtgcatattaaagcaaaaccatttcatttgtggaatcgggcccttttcccaggaaacggtgtttccatttcacaacctaacagaacaggaagagtgtaaactcttgttcagttacagattccttgtgcttcacttagatttccacatttctattgtgctctgagtgtgagagtccagctgtgcgttggtggagtgactcatttttccatggagacgtgtattcctatgaatcccaggggcctctgattggtatgaaagagcaatcagcacagatgtagtccacagatccatcatatgacttaagagagatgatttaaacggtttttccatgggcttaaattgaaagcgtcaactgagctagtcagattattcatatgctccaaaccctttagtgtttacaagtggctaagagtggctacttgagaccacaaaggaatattaatacaagagaaacaaaagcataatctgtattctttgggtgtttaaaaatctcaatgagggccgcgcgcggtaggtcatgcctgtaatcccagcactttgggaggccgaggcaggcagatcatttgaggtcaggagtttgagaccagcctgggcaacatggcgaaatcccgtctttactaaaaatacaaaaatcagctgggcatggtggagcgcgcctgtaatcccagctactcgggaggccaaggcaggaaaaggttgcttgaacctgggaggcagaggttgcagtaagccaagatcatgccactgcactccagcctgagtgacagtgagactccgtctcaaaaaaaggccaggcgtggtgactcacgcctgtaatcccagcactctgggaggccgaggcaggtggattgcttgaggtcaggagttcgagaccagcctggccaacatggtgaaaccctgtctctactaaaaacacaaaaattagccaggtgtggtggtacatgcctgtaatcccagctacttgggaggctgaggcaggacaatcgcttgaacctgtgagacggaggttgcagtggccaagatcgcatcactgcactccagcctgggcgacagagtgagactctgtctgaaaaaaaaaaaaaaaaatctcattgaggaaataaatgttaagaagtagaagaagaattcccaaataagcaaattatatacaatacaaatggatataaaatatatcaatcaatgtttagcagctccaggataagagtaatcaaaattgaagtggctatctggaaaaaaaattcacttttatttttatttatttattttattttttgagacggagttttgctcttttgcccaggctggagtgaagtggcacaatcttagcttaatgcaacctccacctcctgggttcaagcaattctcctgcctcagcctcccaagtagctgggattataggctcctgccaccatgcccagctactttttgtatttttagtagggatagggttttgtcatgttggctaggctggtcttgaactactgacctcaggtgatctgcccacctcggcctcccaaagtgctaggattacaggcatgagccactgtgcccggccaaaaaattcacttttaaaacgtttaaattattttaaatttacagtgtttttttttttttttttttttgagatgatgtcttgctctgtcgcccaggctggagtgcagtgatcttggctcactgcaacctccacctcccgggttcaagcaattctcctgccccagcctcctgagtagctgggattacaggtgcatgctgccacatctggctaatttttttgtattttagtagagatggggtttcaccatgttgcccaggctggtcgtgaactcctgagctcaggcaatctgcccgcctcggcctcccaaagtgctgggattacaggcgtgagccaccgctcccggcccagaattgttttttaaagtacaaaagtattatttcttcatgaactatttgcaagtaagttgacaacctgacaagttttatcacccccaaatactttagtgtgtattttctccaaacacacatacataaccacatagacaacatacattttgtaaccataatacaataatcagtatcaggaaattaatcctcagcagctgataaaatttcaccatttatcccaataatgtcttttatgcataaacgatccaattagacgtaatgcttagcagttactgcatcgttttagtatccttcagtcagggaaatattctttctttggctttcataaccttgacacttttgatgatcataggacaattaatctgcaaaatgttgctcagtttggacttgtctgatgtttcctcatgattagatttaggaaatgtattatctttagcaggaatagcatgaaagggatgctgtgctctcattgcatcctgtcaggtggtacacaattttgatttccccattactagtgatgttagccttgatcattaggttaaggtggtatctgccagacttttccagtgtcaggttatctttttttttttgagatggagtctccctttgttgcacaggctaaagtgtagaggcacgatctcggctcactgcaacctccacatcctagtttcaagtgattctcccacctcagtctcccaagtatctgggattataggcaagcgccaccacccctggccaaatatatatatatgtatatggagagatagagagagagagagagagatgaggttttgctatgttgcttaggctggtctagaacctctgggctcaggccgggtgctgtggctcaagcctttaatcccagcattttgggaggctgaggtgggcagatcacttaaggccaggagagaccagcctgggcaacactggcgaaaccccgtctctactaaaaatacaaaaactagccaagtgtggcagtgcacacctgcagtcccagctactcaggaggctgaggcaacagaatcacttgagcctgggaggcaaaggttgtagtaagcctagatggcgccactgcactccagcctgggcaacagaggagactccatgacaaaaataaataaattaattaaattaaattaaaacaataaataaaacccctgggcccaagtgatcctcctgcctcggcctcccaaagtgctgggattacagacgtgaaccacctcacctggccctatttatttatttatttatttgagatggagtcttgctctgtcccccaggctgggctggagtgcagtggcacaatctcggctgactgcaacctctgcctcccgggttcaagcaattctcctgcctcagcctcctgagtagctgggattacaggtgcacaccaccatgcccagttaatttttgtatttttagtagggacggggtttcaccatgttggccaggctggtctcaaactcctgacctcaagtgatctgccctccttggcctcccaaagtgctgggattacagccactgtgcccagcccttatttatttttttgagacaaagtctcactctgtcgcccaggctggaatgctgtgccatgaacatggctcactgcagcctcaacctcctgggctcagcaatcctcccacctcagcctcccaattagctaggactacaagtacatgccaccttacctgactaattttttgtgttgtttttttttttgtaaagacaggattttttttttatttttttattttttgtagagacaggatctcccaggctggtctcaaattcctgggttcaagcaatcctccggccttggcctccccagctgttgggattacaagtgtcagccactatgcccggactatttaaaaaaaatttttttggagagttttctggtaaaaactggaaaacctgctagacggattctaaaagagctgtaatacttgatttctttgacattttaatttttagtctgaaattttcatttccaaattttcaatttctatgcacaaaattctttttttttcttttttttacagtttttcctcctctgctgaggtttcttttttttcctttttttttctttttgagatggagtcccactctgtcgcccaggctagagtgcaatggcgtgatctcggctcactacaacctccacctccccggttaaagcaattctcctgcctcagcctcccgagtaggtaggattacaggcacccgccatcatgcccggctaatttttgtatttttgtagagatggagtttcaccatgtttgccaggctggtcttgaactcctgacctcaggtgatctgcccaagttggcctcccaaagttctgggattacaggcaggagccactgcgcccgagtggaaagttctaaaattaattgtggctatggttgcacaattctgtgagtattaaaaattgttgacttgtacgctttaaatgggtgagtcgtatggtatatgaattatatctcaataaagctattacaacaaaagattcagcagttttcaaaatagaacatatatatacttttttttccttttctttttttttcttttgcagaaacaggaactatgtgtcccaggctggtctcaaaatcttgagctcaagtgatcttcctgacccagcctcccaaatcgctgggattacaggtgtgagccaccatgcctggcctgaaaatagaatatttggaaataaaatgataaattcaataaatgaaatccccaagattggaggagaccctaaactgaatgaaaacagaaattaactcatgttacaaatgaacaacaaaactgtactgaaggagaagtggtatgggaatagcaattatgacattatattgtgcatattatagaattaagcaaatgacatataaaagaatgtggaagctagagttctcactgtaggaaaaaagtagatttaaatatgaattagggaatacaaaggaaccttagatgggtggaactggtgttagaggcatcagtataaacccataacttcatatacatttgtagagatagagctagaggtttggcctctgtgtgttgaaggcttagaagcaataacacaatgtaacaatgagcaggcttggtaccaagatcttggtttctaaatattattcctcacaacaaagaaacagcttcttagagaaatggatgacttcagggctggaacaaggaaagtataagctaagcttaaaatatcctattgtgatagaaattaaggaagtcccctgccacccccaacaccccagcaaaatgatgggaatatgtcaaaaaacacaggaggaagttccaattatggctgagtaattcccatcacaccaagtcttctgtaaataagaatgatatactcagagcaaaatattaaagaacaaacaaaaactacctgaaggcattagcaaacaacaggaggaatatactgcacagaggtggatacctggaagagaagaggactgaatgggtttcctgtgtttttacagcttttagtctaagggaagtccaaagtctgcaaagtgagtggttaaaacaaagctgggggtagtggtgtgcgcctgtagtctcacctactcagaaggctgacgtgtgaggaaaccgtgagcacaggagttcaaggctgtagagcactaagattgtgcctgtgaatacccactgtattccaacctaggcaacacagtaagacctcatctcttttttttttttttttttttgagacagagtttcactctgttgctcaggctggagtacagtggcgtgatctcagctcacagcaacctctgccttccgggttcaagtgattctcctgcctcggtctcttgagtagctgggactacagctatttttagtagagacagggtttcaccatgttgcccgggctggtcttgaactcctgacctcaggtgatcagcccatttcagccttccaaagtgctgggattacaggcatgaaccactgtgctcgagatcttatctcttaaaacgacgacaacaacaacaaaaacaaaacaacaaaaacccaaaccctgcagtcttactagcttgaattgttcagggcaaccccagcaggtggaaataatgggaggaaatcctatcaaaataagagccacagagagggaggctcaaattctgtgcataaactatagtcccagctactcgggagtcccagtacctgtagtcccagctacttgggaggttgaggtgggaggctcgcttaagcccagaaagtcaaggctgtagtgagctgtgatgatgccactgcacaccagcctgggtgacagagtgagaccctgtctcaaaaaaaaaaaaaaaaaaaaaaattcagaactttaaaaaatcaccctgaaaagaaaccccatgcccttttattatttttttcacttttttgactttattattttttctttaaaacaatatttattcttttttgttgagactgggtgtcactatgttgcccaggctagtcttgaactcctgggctcaagccatcttcctgcctcagcctcccaaaatgctgagattacaggtgtgagccactgtgtctggccaagaaaccccatgccctttagccatcacgttccattctccccatcaccccagccctaggcattaataatccactttttgcctctatagatttgtctactctagacatatcatataaatgcagtcacatatgtggtcttttttgactgacttctttcacttactatgttttcaaggtttttgttgtaacatgtgtcattacttcatccctttttattgctgaataacatctcattgtatggctatactacactttctttatccattcatccattgttgaacatctgggttgtttccaattttgggctattgtgtataatgctgttatgaacatttgtgtacacgtttttctgtggacatttggtttttatttctcttaggtgtatacctaggagtggaattgttggattatatggtaactctatgataagccttttaagaaattgccagactattttccaaagtagttgccccattttacatcttcaccagtagtgaatgggggttccgatttctccatatcttcaccatgaatctttttaagaaaatagattattgaccagaggtcaggcattcgaggccagccgggccaacatggcgaaatccctcctctaataaaaatacgagtattattggctgggcacggtggctcatgcctgtaatcccaacactttgggaggccgaggcgggtggatcacgaggacaggagattgagaccatcctggctaacacggtgaaacactgtctctactaaaaatgcgaaaaattagccaggtgtggtggcgggcgcctatagtgccagctacttgggaggctgaagcaggagaatcgcctgaacacaggaggcggaggttgtagtgagctaagatcatgccactgcactcctgcatgggtgacagagtgagactctgtctcaaaaacaaaacaaaacaaaaaacaaatattagcaggctgtggtgatgcatgcctataatctcagctactcaggaggctgaggcaggagtattgcttgaacccggggaggcagaggttgcagtgagctgagatcgtgccattgcactccagcctgggcaacagagcaagactctgtctcaaaaacaaaacaaaacaaaacagattattgatatataattcacataccacacaattcactcaaagagtgcaattcaatggttttggtatatcatgttaatttttaaaattgtggtaaaatataaaagttgccattttaaccattatatatataaatatatgtgtgtgtgtgtgtgtgtgtgtgtgtgtgtgtgtatatatatattttttttttttttttgagatggagtcttggtctattgccaggctggagtgcagtggcatgatcttggctcactgcaacctctgcctcccgagttcaagcaattctcctgcctcagcctcccaagtagctgggactataggcacacaacaccatgctcagctaatttttgaatttttaaattcttactccttctaggactctgacgacataattttctttctttctttccttttttttttttttttttttgaggcagagtctcactctgctgccatgtgaactatgttggccaggatgaccttcttgatctcttgacctcgtgatccgcccaccttgacctcccaaaatgctgggattacaggcgtgagccactgtgcccggccatatatatatatatatatatatatatatttttttttttttttttgtaatatagagacggagccttgctatgttgctcaggctactcttgaactccaggcctcaatgtattctcccacctcagcctcctaaagttctgggattgtagaaatgagccactgtgcctggtccccattttaaccttttttttttttttgagatggagtcttgctctgttgcacaggctggagtgcagtggtacgatctcggctcactgcaacctccacctcttgggttcaagcaattcttctgcctcagcctcccgagtagctgggattacaggcactcgccatcatacccagctaatttttgtatttttagtagagatggggtttcaccatgttggacaggtagtgctcgaactcctgatctaaggtgatccacctgcctcagcctcccaaagtgctgggattacaggcatgacaccgcgcacagccttaaccattttttaatgtacaattcagtggcattaattacactgacaatgtgcataactatcaccactatctatttccaaaataaaagagaaattctgttcccattaaacaacaattctccattccctgcttctcctagcccctggtaatctgtaatctactttctgtctctataaatttgcctagtctagtctagtctagatatttcacttaagtggaatcatacaatatttgtccttttacaatctgccttatttcacttagcatgttttcaagtttcatccatgttgtagcatgtgtcatactttcattcctttttatgaaatttaattttaatattaaagaatatttcagtccaggtgtggtggctcatgcctataatcccagcactttgggaggctgaggtggtcagattgctttgagcttaggagtttgagaccagcctaggcaacatggccgaaccctgtctctactaaaatacaaaaattagccggccatgatggcgggcgtctgtaatctcaagtactcgggaggctgaggcaggagaatcgcttgaccccgggaggcagaaggcggaggttgcagtgagccgagattgtgccactgcactccagcctgggcagcagagcgagactctgcctcaaaaaagaaaagaaaagaaagaaagaaaggggagagagggagagggagagagggagagagggagagagggagagagggagagagggagggagagagagagaaagagagagagaaagagagagagagagagaaaattatgtcgtcagagtcctagaaggagtaagaatgtaagaccgaaaacttattcaaagaaataatgggctgggtgtggtgattcacgcctgtaatcccagcactttgggaggccgaggcaggaggatcacgaggtcaggagatcgagaccatcctggctaatacagtgaaaccccgtctctactaaaaatacaaaaaaaaattacccgatgtggtggcgggcgcctgtagtcccagttactcgggaggctggggcaggagaatggcgtgaacccgggaggcggagcttgcagtgagccgagatcgcgccactgcactccagcctgggtgacagagcgagactccgtctcaaaaaaaaaaaaaaaaaaaaaaaaaaaaaaaaaaaaaaaaagaaaaagaaaaaaaaagaagaaataatggcagaaaattcctcaaatttgacaagagacctagaactacaagttcaagaagctgagaaaaccacaaacatgataaactcaaagaaatctataccaggacacgtaataatctaactcctgaaaactaataacaaagaaaaaatcttgacagcagtaagagaaaaacatctttctcataagggaaaaacagattgaaccacaatagatttctcaccagaaactaaaaaaggccagaagaaagtggcacaacttttttcaaatgctagaagaaaaaaactatcaaagatgaaagagaaatcaacacattttcagatgaagaaaaactaagagaatttgtcatttgtagatctaccctttaaaaaagtggctaaaagggggccgggtgcagtggctcatgcctgtaatcccatcactttgggaaaccgaggcaggcggatcacttgaggccaggagtttgagaccagcctggccaacgtggcaaaacctagtctctactaaaaatacaaaaattagccaggcatagtggcacatgcctgtagtcccagctactctggaggctgaggcaggaaaatcggttgaacctgggaggtggaggttgcagtgagcagagatcgcaccactgcaatccagtcttggtgacagggcaagactccatctcaaaaaaaaaaaaaaaaaagctaaaggaagttcttgaaaagaaagggaaatgataaaagaagggaccttggaacatcaaggatgaaaaaagaacgtggagtggcccacacttgtaatcccagcactttggaaggccgaggcgggcggatcacgaggtcaggagatcgagaccacggtgaaaccccgtctctactaaaaatataaaaaattagccgggcgtggtggcgggtgcctgtaatcccagctactcagagaggctgaggcaggagaatggcgtgaacccgggaggcggagcttgcagtgagctgagatcgcaccactgcactccagcctgggtgacagagcgagactctgtctcaaaaaaaaaaaaaaaagaaagaaaaaagaacgtggaaagcaaatatatgagtaattgcaatatactttccttcttgtattagtcatctagggcttccataacaaaatactgcagactgggtaacttaaccaacagaatttattttctcacagttctggaggctggaagtctaagaccaaagtgttggtaggtttggtttttcctgaggcctcttttcttggcctgtagatggccaccttcttgctgtgtcctcccatggccttttgtctgtgtgtgaccactcctggtgctttttcctcttctgaaaaggacactgggccgggcgtggtggctcacccctgtaatcccagcactttgggaggccaaggcaggcggatcacctgaggtcgggagttcgagacaagccaacatggagaaaccccatctctaccgaaaaaacaaaattagccgggctaatccaacaggactggtgtccttttttgtggggggggacggagtcttgctctgttgctcaggatggagtgcagtggcacaatctcagctcactgcaacctccacctcccaggttcaagtgattctcctactttagcctcccgagtagctgagattacaggcatgtgccaccacacccagataattttcttttttttttttttagtagagacgggggtttcaacatgttggccaagctggtctcaaactcctgacctcaagtgatcctcccacctcggcctcccaaagtgctgagattacaggtgtgagccaccaagcccggctggtgtcctttttttcttcttttctttttttttttttgagacggagtttcactcttgttgcccaggctggagtgcaatggcgtaatctcggctcacagcaacctctgtgtcccgggttcaagcaattctcctgcctcaccttcccgagtagctgggattacaggtgtgtgccaccactcctggctaatttttttgtgtttttagtggagacagagttttgccatgttggtcaggctggtctcaaactcctgacctcaaatgatctgcccatcgtggcttcccaaagtgctgggattacaggagtgagccaccgtgcccggccctcatttaatcttaattacatctttaaaggccctgtctccaatgtacagtcacaatagaggttagggattcaacataggaatttgggaagacacaattcagtctataacacttctcctccctctccctctccctctccctctacccacggtctcactctccctctccctctccccacagtctccctctccctctctttccacggtctccctctgaggccgagccgaagctggactgtactgctgccatctcggctcactgcaacctccctgcctgattctcctgcctcagcctgccgagtgcctgggattgcaggcgcgcgccgccacgcctgacaggttttcgtatttttttggtggagacggggtttcgctgtgttggctgggctggtctccagctcctaaccgagagtgatccgccagcctcggcctcccgaggagccgggattgcagacggagtctcgttcactcagtgctcaatggtgccctggctggagtgcagtggcgtgatctcggctcgctacaacctccacctcccagccgcctgccttggcctcccaaagtgccgagattgcagcctctgcccggccgccaacccgtctgggaagtgaggagcgtctctgcctggctgcccattgtctgggatgtgaggagcccctctgcctggctgcccagtctggaaagtgaggagcttctctgcccggccgccatcccatctaggaagtgaggagcacctcttcctggccgccatcccatctaggaagtgaggagcgtctctgcccggctgcccatcgtctgagatgtggggagcacctctgccccgccgccccgtctgggatgtgaggagcgcctctgcccggccgtgaccccgtctgggaggtgaggagcgtctctgcccagccgccccgtctgagaagtgaggagcccctccgcccggcagccgccccctctgagaagtgaggagccccctccacccggcagccaccccgtctgggaagtgaggagcgtctccgcccggcagccatcccgtctgggagggaggtggggggtcagcccccgcccggccagccaccccgtccgggagggaggtggggggtcagaccccacccggccagccgccccatccgggaggtggggggcacctctgcccagccgcccctactgggaagtgaggagtccctctgcccggccaccaccccgtctgggaggtgtacccaacagctcattgagaacgggccatgatgacaatggcggttttgtggaatagaaaagggggaaaggtggggaaaagattgagaaatcggatggttgctgtgtctgtgtagaaaaaagtagacatgggagacttttcattttgttctgtactaagaaaaattcttctgccttgggatcctgttgatctatgaccttacccccaaccctgtgctctctgaaacatgtgctgtgtccactcagggttaaatggattaagggcggtgcaagatgtttttgttaaacagatgcttgaaggcagcatgctcattaagagtcatcaccactccctaatctcaagtacccagggacacaaacactgcggaaggccgcagggtcctctgcctaggaaaaccagagacctttgttcacttgtttatctgctgaccttccctccactattgtcctatgaccctgccaaatccccctctgcaagaaacacccaagaatgatcaataaaaaaaaaacaaaacaacaacaacaaaaaaaacacttctcctcttgagttttctcaattatgtttgatggttgaagcagactgtgtaacattgtccaatgtggtttgcaaagtatgttgaggaaatatttaagacaattatgttgtaaatgggaaagtaaaaagactaaaatggaggtaagagttttatacttcactcaagctgataaaaatattgacatcagttggccaggcacagtggctcacgcctgtaatcccagcactttgggaggccgaggcaggtggatcacctgagttcaggagttcaagaccagcctggtcaatatggtgaaaccctgtctctactaaaaatacaaaagttagccgggcatggtggcacatgcctgcaatcccagctactcaggagactgaggcaggagaatcgcttgaatctgggaagcagaggttgcagtgagccaagattgcgccactgcactccagtctgggcgatagagagagactccgtcttaaaaaaaaaaaaaaaaaagaaagaaaaaagaaaaaatattgacatcagttgactgtgataatttatatatgtataatatgaaacccattacaaccacttaaaaaatctacacaaagagatacactcgggccaggcgcggtggctcacgcctgtaatcccagcactttgggaggccgaggcgggcggatcatgaggtcaggagattgagaccatcctggctaacacggtgaaacctcgtctctactaaaaatacaaaaaaattagccgggcgtggtggcgggcacctgtagtcccagctactccggaggctgaggcaggagaatggcgtgaacctgggaggcggagcttgcagtgagctgagatcgcgccactgcactccagcctgggcgacagagcgagactccgtctcaaaaaaaaaaaaaaaaaaagagatgcactcaaaaacactataggaaaattaaaatgggatttaaaaaaaaaaggtacaagtagcccacagtaagccagaaaaaatcaaacacagagacaacaagaggaacaagcagaaaacaaaaaataaaacagcagacttaaaccttttatttatttacatacttatttttttagcaatggagtcttgctgcaagagagcagtggcatgatcgtagctcactacagcttcggactcctgggctcaagtaatcctcccacctcaacttcccaagtagttgggactacaggtgcacatgccaccactcctggctagttaaaaaaaattttttttttttgtagagatgaggtcttgctatgttgctcagactggtctcaaactcttgggctcaagcgatccttctgcctcagcctctcaaagtgctggggttacaggcatgagctaccacacctcgcctttaagccttaaggtatcaataattacattaaatgtaaacaaagtgcaccaattaaaaagcagactttggccgggcacggtggctcatacctgtaatcccagcactatgggaggccaaggcaggtggattacttgaggtcaagagtttgagaccagcctggccaacatggtgaaaccccatctctactaaaaatacaaaaaaattagctgggtgtggtggtgggcgactgtaatcccagctactcaggaggctgaggcaggagaatcccttgaacccaggaggcaggggttgcggtgtgctgggatggtgccaccacactccaacctgggtgacagaacgagactcaatctcaaaaaatacaaaaataggccaaggacagtggctcacacctgtaatcccagcactttgggaggcctaggtgggtggatcacctgagatcgggagttcgagaccagcctgaccaacatggtgaaaccctgtctctactaaaaatataaaattagctgggcgtggtggctcatgcctgtaatccaagctacttggggactgaggcaggagaatcccttgaacccgggaggcagaggttgcggtgagccgagattgcaccattgcactccagcctgggcaacaagagcgaaactctgtctcaaaaaaattaattaattaattaattaaagttaaaaaagcagacattgacaatggattaaaaatatgacacaacaatatgttttcttttttctttttctttttctatttttttttttgagatggagccttgctgtgttgcccaggctggagtgcagtggcactatctcggctcattgcaacctccgcctcccaggttcaagggatcctcctgcctcagccccccagcagctgagattacaggcatgcattaccatgcctggctaatttttgtatttttagtagagatgggatttcgccatgttggctaggctggtctcaactcctgacctcaggtgatccacccgcctcggcctcccaaagtgctgagattacaggcatgagccaccgtgcccggacaacaatatgctgttttcaagaatctcatttcaggccaggtccagcggatcacatctgtaatctcagcacttcaagggactgagtagggaggctcatttgagtccaggtgtttgagtgcagcctgtgcaagatagtgagacattgtctccacaaagaatcaaaagattagtctggtttggtggtgtgtgactgtggtcccagctactcaggaggctgaggcgggaggactgcttcagcctggaagttgaaggctgcagggagtcatgattgcaccattgcactccagcctgggcaacatagcaagagagtctttttagaaaaaaagaaatgggtcgggcgctgtggctcatgcctgtaatcccagcactttgggaggcagaggcaggcaaatcgcctgaggtcaggagtttgagactagcctgaccaacacggtgaaaccctgtctctactaaaaatacaaagattagccaggtgtagtggtgtgcacctgtaatcccagctactcgggaggtggaggttatggtgagccaagatcgcagccctgcactccagcctgggtgacagagcaagaccccatatcttaaaagaagaaaagaaaattttactaagtatatactgaataccaggtaccaaaataggcagtgagaatacaataagtgagatacgcagggtcccttctcttggagctttatgttctactgaaagttagatctctcctttgaacattgaatcaactagatcttttctattagaattttccgatgtattcattccacgtctccctttctttctcgaagtcactagaaacccaatatagaaacatttgccagattttccacttcagaaatctcgaactagtttctcactttcctggacaaatatttcaggtctagtgtcacagatgtttttcagccttgtgtcactcagccctttccctcattcccatcccaagatttctcatgttttccaaatttcatttccttaaaaagcctctgcatagcattcttaacttccacaagttaagaggctcactgcctcatgtgtctgtcacaggagtcatgagggttgcataaaataaaatgttacatgccttaggctcatttatatctccttgtccatgcaatcattagcagagcttccgaggaagtctcaaaatctattaggtttttactttttaccaaaaggcctttaatcttaaacactcacaggtttgaaagtaaaagcagaagtattttaaggaactcacagtgaagttgtaaaagggactacttctatggaaacaaactgctaatcaacaggtcacctaaaggttgtagcagtagaaatgtctcaatgaacgctcatatcagattcttggtagaacagttttaagaatcagaattcattttcacataaaaagaaaacttttaaaaatggaattctggttgcaaaaaggaaaacatagggcaggtgtggtggcttacgcctgtaatctcaggactttgggaggcagaggagggcaaatcacttgaggtcaggtgttagagaccagcctggccaacatggtgaaaccctgtctctactaaaaatacaaaaaaattatccgggcgtggtggcaggccctgtaatcccagctactcgggaggctgaggcaggataaatgcctgaacccaggaggcagaggttgtagtgagacgagactgcgccacggcactccagtctggatgacagagtgagactccgtctcaaaaaaaaaaaaaaaaaggaagaaaagaaaaaaaaattcatgtataacggggaacctgtgaaggtggcctcatttggaaataggatatttgcagatgtaatcaggttaagatgggatcatactggattaagtggtgccctaatctaatggctggtgcccctataagaagaggagaatttgcctacagacagagacacatagagaaggccgggtgcagtggctcactcctgtaatcccagcactttgggaggctgaggcgggtggatcacttgaggccaggagttcgagactagcctgagcagtatggcgaacccccgtctctactgaaaatacaaaaattagctgggcgtggcggtgcacacccgtaatcccagctactcaggaggctgaggcaggagaattgcttgaacctgggaggtggaggttgcagtgagctgagattgcgccactgcactcgtctgggcgacagagcaagactctatctcaaataaaaaaaaaaagacatatagaagaaagaataccatgtgacgatggaggcaacaattgaaatgatgcatctataagccaaggaacaccaaggatttctggcaaccaccagaagccaggaagagggaagaaaggattctttcccagagcctttggagataccatgctctgcagacaccttaatttcagacttctagcctccgctgtgagagaataaatttcggtgtttttgtttttttgagacagggcctcactgtgtcacccaggctgaaatgcagtggctcaatcacggctccctgcagcagcatcaacctccctggctcaggctcaagccatcctcccacttcagcctcctgagtagctgggtctacaggcacgtgccaccatgcccagctaatttttttttttttttttttttacagacgtgggtcttgctgtgttgtccaggctggtctcaaactcctgggctcaagccatccttctgccttggcctcccaaagtgctgggataacaggagtgagccaccgtgcatggccgatttctgttgttttttgtttttttgagacacagttttgctttttcatccaagctggagtgaggtggcgcaaacttggctcactgtagcctctgccccctgggttcaagtgattctcctgcctcagcctcccaagtagctgagactacaggcgcccaccaccatgtcttgctaatttttgtatttttagtagagatggggtttccccatgttggccaggctagtctcgaactcctgacctcaggtgacaggctggcctcggtctcccaaagtgctaggattacaggcgtgagccacctcggctgacctgatttctgttgttttaaatgctacccaggttgtggttatttgtatggcagccttagggaaacgaatactggaagcctgtggagaagacactggagcagatacgtatttcaaaacaccgggcttaacgttaaaactctcctctaggccccatctaggaatctaagtgggataagctaagatgagctagctgattcttcactggtggaaatttggacaattgacacgcattcattcaaactaaaaattaaagataaaaaaccacatttaataatttcactacagtgacaattcttgtaacattttgagactctatcagttagatccctacctctgttctattctttttgtggtagtgaagaactaatctttataactgtttttttttttttcagactcagttttgctcttattgcccaggttggagggcaatggcgcgatcttggccactgcaaccaccgcctcctgggttcaagtggttctcctgccttagcctcctgagtagctgggattataggcatgcaccaccatccccagctaattttttgtatttttagtagagatgagttttcaccatgttggccaggctggtctcaaactcccgacctcaggtaatccacccgcctcagccttccaaagtgctgggattacaggcgtgagccaccacacctggctttaattgttttttagccattttcacaaatgctagggaatagctcggtttagatactcggaactgtgtcactggccaagcctcatatggaattgctcatgtcttctagggctgtaggtgtggtcaacagcattttaaatttgatcttattggacatatgcctcagttttaccatatcatctgttatatggggataataatagtaactgcctcctaatgttgttgtgaggattaaatgagtttgtatttaccaagcatgtagaaaagtgcctggcacatagtaagtattaatcactgcactcctctctctcttgccatttgggaagtttctttctcactgaaccatgagctctccaaggataagaagcatgtctgtttcattttctatccccagcacctagtacccctctctggcacacagtaggccctcagcaagcatctgctgcctaaaaggcactatcaagcaggcagtatgaaattccatttctgagtcttgaagaaggaagtcaggtggaaaaacagataagagtcctacacataaacgtttaagcttgacaacactcaagaccatcaaggaagacagcatggagggaaaataaatagaacactgaggaaagattgatggcaggagatggaagcaaacagaaaaggagttctgaaacaatattctttcaaagaagccgtgaaaagagttcaagggaattgaagtaagtccacaggaaaggctgtcttaaaagtggagtatgaaaaatttgtggttagcaagcagctgactgaggttaatttttttttaagtctcagaggaaggaaatgatattgtgtaacagttttctctaacttggcaggcttttaaatgtgggtcccgatctgtcttgccagaagggttgagagctagggagcagggagaaggagggtatgggtctctccaagactctgtgtcttaagaaggttgtattgaagtcaggttatatcttcactcacaatatgagacaataaattcaaataaaacgtccatttttgtccccttattttgtttaggctggtaaagcaggtttgatgatgtttttgtcaggttgacaaaattatcagcaacaagtttttatctggaatatctccctcattacacttgaatttcaacagggttccaccacccaggaagacagaataaccggttttctgagtttttcctgatacaattctggttatcacaaacgacttgagatccctactcttctttaaaagggcaagaaaagggaatcaatatcaatatttgataatggcatttaaaaaataatagacatcacttttgcgtttaaaaaatgtttttcaatatttaatttacaagttgagtacaagccataaaaaatgtttttaaaataaatttgaggaattgaaaactcctaagtggtcaattgagcccacatgaatctaccaaacaagactgaaatgtactttcacaacatatggtctgatgaggtttttcctgttaaacagagaaaaatagacccggggaagttgctggaaggcatgaaccatgtaccatttaaagagaggttttccatacttatgcaaatgagaccccgttaaagactctactacaggatctaaagctagccgctccccagtctggggctcaaatgttctcatctgtaaaataagggaaaagagaaagggtggtatatgtgtctgcgtattaattatttgagtgtgtgtgtgaattctttggatatgaaaataaagagagaagacattaattatttgggtgcgtatgtgtgaattaattctttggatatgaaaataaagagagggccgggcgcggtggctcacacctgtaatcccagcactttgggaggccgaggcgggtggaggccaggaccagtctgggcaacatggcgaaaccccatctctacaaaaaatacaaaaatagccgggtggcgtggtgcgtgcctgtaatctcagctactagggaggctgaggcaggagaatcccctgaacccgggaggcggaggctgcagtgagccgagaacgcgccactgcattcccgcctgggaaacagaccatctaaaaaaaaaaaaaaaaaaaaaaaaaaaaggccgggcgtggtggctcacgcttgtaatcccaacactttgggaggccgaggcgggtggatcacgaggtcagaattcgagactcagcctggccaacatagtgaaaccccgtctctacttaaaaaaaaaaaaaatacaaaaattagccgggcatggtggtgcgtgcctgtagtcccagctacttgggaggctgaggcaggagaatcgcttgaacccgggaggtggaggttgcagtgggccgagatcacgccactgcactcctgcttgagcaacagaatgagacttcaaaaaaaaaaaaagaaagagaaaagacaacctaccccagtataaggggtaagaaaaaggattcagggaggctcaggaacttaaggcctcgagcacctgcacctccagccccacccgctaaccctccccagcgtggagatacagcacaggggccaacatggcgtcagcacgctgggtctcgcctgcgacccccgtgactccgcactgctgcagcccgggcgaggctgcgccccattggccaactgcaatgaggtcattgcgggggcgggggccggcggcggcgcaggggcggggctttacggacgcaagcacgtcgaagcgctgctcctggagccgcggagggtgcgggtttggctgcggtggtttctgtggcggttgctgtggcggagtttggaggtgagtgggggctgtaggtttagcgcaacagggagcggccctcgatggacgtaggaaatccttctaagagcccccttgattgtcagaggaattagcggggatctgacgtcttcgagataaaatgggggttcgccccctccttgggcacccctcctctgccctgaggaaccggaggctcactgccctttggaagccccgcatctcttccctgctttaaggggtaggcggaggaaccggaggttattggataggcagaagaatttagggggcttcttaaagggtttctcagtttgggggttttcctctccttttttcccatctcaaggtagatgagcctgagtccagagaattcctgctcattgggtagacaggaaatgaagcaggtgaataccgtgggaggaggcgaggaccggatgacaggagtgagattcttctaggcagggcgcgggggcgctgtagttggactcatcttttgcagaattgctgtttcttcatattttgttttgtgatcgtccagaactactttggcctaattagttttctgttagcctccattgctatagagatattcttgggagacctataatcattaaagagcaggaggacggaggcgactcgttggaggcttatcattatccacagctcctgaactatgctgaccaggcctaattttatgtgtttagaggttgtagaatctctctttgtttaagggtggtgccggtaacagctgatttggatgattcagatgtacagaatcttaaagtcagcctgcatattctcttgagaagtccttgcttatgtctgagcttgtgttactgtcttgaacatcacatgcacaaaggtttgttcgttcagatttctcaaaatgtctcccagccttccagaagagtaaatcttcctttgatgtcagactcatctatcagtactcagtatagatgcccttatgacactaaaaatactgtgcatttttctgagtttggatactggacaggctgtgccttacattagctgatcgagaataaataattgcagtttcaggaccactgatagcgccagttgtctcatacccggcaacagtaagacagcactaaaacgaaacctttattggctcatgagatttgacagatggaagaatgtaattaatcttgaaggtagggttgagaaacagaaagctgcagaggtggaaggcttattctctgtggcttgataaaactgctttgtcattatcagtgtgttcctgtcatgcttgatttgaaattgagcttaatatgcaaactggttgctttttccagatgacggttatttgtttgaattcctaagtggggaaatattgttttctgaggaatctggaagattaaaccctttagtgtagccatagctttaggatagtgccagaactttgggcttttagaaatgcgcattgtcagtagaagggagaaggatagttacaaggcagacatctttatgagagggtattgaaggcctcttctgtttgtttcctgcactagcaaaaacagattgagcagtgtgaaactcactgcctcaatattgtgtcctgggtatttaaagagttgtttgaggttcccagttcctgtctttaatctggatacattcttatcagttgagttgcccaaaataattgtcatttgatcctgatgttgactggaatggaagtgacttttcatctgacactctgtgggacagaattcaggaactgcctttgcaatttctcctttccatctttctagacagggtgtcaaaaacagttgttgacctgtcctcatggggtgttagaaatgtaaatgcaagagccgtagtggggtgtcatttgctcttagccctcgtggtaatttccaaagttatgtcattttctctttgcttcaggttggagagaaatccaggtactcactagactggtaccttctgccaccatgggggagcttttccggagtgaagaaatgacactggcccagctttttctacagtcagaggctgcttattgttgtgtcagtgaattaggagaacttggaaaggttcagtttcgtgacgtaagtagttgtggggctgcgacttgattactgctgaactctattgctatcgtggtcagatgccttatgatgaatgttttgttttttatttgcaaaaataacattatagcactgacttcctattggcagaatgcacattttgagttgtctttctaaaggtgagaatgttttgtgccaatctttacatgcttttgctagctcccactttcagaacagtcctaagcattctccaggtaattgtttgggatgcagggagaggttaccaaactaacctgatcaaggctttcacttgctaaatagcaaggtatttaaaaaaatatattgcagtttttccatatagtaggacattttaaaaaaaataaaatttgaggtatccagctacagatatatagtatataaataagcatatactgaatattcattattttggaatattatactgggcacttggagaagctatctaaagaatatggacaatctagcctgggtacagtggctcacgcctataatcctaacactttgggaggctgaggcgggcggatcgggaggtcaggagtttgagatcagtctggccaacatggtgaaaccccgactctactaaaaatacaaaaaaaattagcatggtggcgcaggcctgtaatcccagccactcgggaggccgaggcaggagaatcgcctgaacctgggaggcggaggttgcagtgagccgagattgtgtgattgcacgcagcctgggcgacagagcaagactccgtctcaaacaacaacaacaacaacaaaaaacttgtcatccttaatttgcagttcttcatctggtcctatgttgtccctctgcttaacatctattggctctattcagccttcttttcttttacttatgctgtacttcagtcatacaaaaaaaagagataggggccaggtgcaatggctcacacctgaaatgccagtactttgagaggccaaggcaggaggatcgcttgagcccaggagttggagaccagtctgggcaacatagggagatcccgtctctgccaaaaaaaaaaaaaaaaaaaaaaatgccggatgtggtggcacatggctgtggtcccagctgcttgggaagctaaggtgggaggatcgctgaagcccaggaggtcgaggctgtagtgagctgtgattatgccactgcactccagcctgggtgacagagcatgacactgtctcaaaaccaaaaaaaaaaaaagaggtggggggagtattataatgaccacctatgtttctactatctgcttaagagggaaacattccgtgtataattgaaacctctgtttctctttgctccatgccagtcctttcttccaccccagaggtaacccgtacagtgatttgttttgcttttatttctcctatgtgtggtttttgttgttgttgttgttgcttttctttttgagacagagtccactctgtcgcccaggctggagtgcagtggtgtgatctcagctcattgcagcctccgcctcccaggttcaagcaattctcctgcctcagcctcctgagtagctgggactaaaggcatgcaccaccatgcccagctaatttttgtatttttagtagagacggggtttcaccacattggccaggctggtctcgaacttctgacctctggtgatccacccgcctcggcctcccaaagtgctgggattacaggcatgagccaccatacctggccaacagatatttcagtttcttctagttctgttaatttttttttaataataaaatttataacattaagaaaaaaaatagagatgggggtctcgccatgttacccaggttggtcttgaactcctggactcaagcggttctcctgcctcagcctcccaaagtgctaggattaccggtgtgagccactgtgcctggctgaaatgtacacatcttaagagtacaatttgctgaattgataactttatacacctctgtaaccagcaccccaatcaggatatggaacttttttttttttttttttttttttggagacagaatcttgctctgtcgcccaggctggagtgtagtggtgcgatcttggctcactgcaacctccgtctcctgggttcaagcaatcctccctcagcctcctgagtagctgggactacaggcgcacaccgccgagcccggctaattttttttttctattttagtagagatggagtttcaccatgttgcccaggctggtctcgaactcctgacctcaggtgatccatcccccctcagcctcccaaagtgctaggattacagacgtgagccaccaggcccagactgaacattttcatcagtccagaaaagtatctgtgtctactgctagtcagttgctacccttcataggtaacctctgttttgattgctgtcatcataggattagttttccctgttcttgaattatatgtaaacgactcatacattgcaaactcatgtctgacttctttcactcagcctctgtttcttgcatgtatccgtagttcatttttaaaaattgccgaacggtaagtagttcattgtatgattacaccacagtgttttcatcctttcttttgtcattactcttttggggctattatgattaaagctgaagtaaacattatcataaaagtcttttttttagtttacaagttttgatttttcttaagcaaatacagttgatccttgaaaatgcaggggttaggggtgccaatctccccatgcagtcaaaaatctgcatacaattttgactcctccaaaacttaactattgatagcctgcttttgaccagaagccctaccaatttcataaacagtcgattaatacatattttgtatgttatatgtattgtacactgtattcttacaataaagtaagctagagaaaagaaaatactgttaagaaaatcataaggaagataaactgtatttactgaaagtggatcatcttgaaggtcttcatccttattgtctttatgttgaggaggctgaggaggaggaaggggaggggttggtcttactgtctcaggctggccgaggtggaggaaaatctgtgtgttagtggaccagcagagttcaaacccacattgttcaaaggtcaacagtaactgagtagtggaatgctcagtcatgggttgggtaggtgtatgtttaactttgtaagaaactgccaacagttttccacatcttttacttcctttttaatagcatttatcacaacaaattgtaataattggtttgtgtccgtctcttctgtagagctgaagactgggacgtagcttattattaatcttaattgctaataaaaatttttgccttagattcctctaatattaatatattgagttctcgaagagagaagtgttgaatacatggatatgtatgtgtgtgtttgtatttttttttttcttttttttgagactgagtctagttctgtcacccaggctggagtgcagtggcacgatctcggctcattgcaacctccgcctcccgggttcaagcaattcttctgcctcagccttccaagtagctgggattacaggtgcccgctgccactcccggctaatttttttgtattttcagtagagacggggtttcactgtgttggccgggctggtctcgaactcctgacctcatgaactgcccgccttggtctcccaaagtgctgggattacaagcgtgagccaccgtgcccggccaatgtgcttgtatgtttctatgtgtgtatgcatataatatatatacacacatacgtgattaagctaataaattgtgttgttcagcttttcaaagctaggacatagcttattctttgtattttccccagtgcctagttcagtatctgacacctatttggtgcttcataaatgttgagtaaatatagttctttatttgtgttaattttatggaatttatcacatactattttattggttgggttcatcttcttctctattagattgcaagctttttatttaatttaattaatttattattattattttttgagacagagtctcgctctgttgcccaggctggagtgcaatggcacgatcttggctcactgcaacctctccctcccaggttcaattgattcttgtgcctcagcctcctgagtagctgggattacaggcatgtaccatcatgcccggctaattttttgtatttttagttgagacagggtttcgccatgttgtccaggctggtctcaaactcctgagctcagataatcctcctgcctcagcttcccaaagtgctaggattataggcgtgagccaccgcatccggcctatttatttttttgagacaagagtctcactcttgtcacccaggctggagtgcagtggcatgattttggctcactgcaacctcagcttcccgggttcaagcgattcttctgccttggcctcccgagtagctgggattacagatgtacactaccatgcccggctaattttgtatttttagtagagatggagtttcgccatgttggccaggctggtcttgaactcctgacctcaggtgatccacccaccttggcctcccaaaatgctgggattacaagcgtgagccaccgtgaccggccagattgctagctttttagtgagtagttacttgttttgtttttatttgtatattccagaacatctgtcatattgctttgaaaattacttatggtgccagacgtggtggctcatgcctgcaatcccagcactttgggaggccgaggtgggtggatcacctgaggtcaggagtttgagaccatcctggccaacatggtgaaaccctgtctctactaaaaatgcaagaaaattagctgggcatggtggtgcgcacctgtaatcccagctactcaagaggctgaggcgggagaattgcttgaacctgggaggcagaggttgcagtgagccaagatcacgccactgcactccagcctggtgacagagcaagactctgtctcaaaaagaaaaaaagcaattacttgtggtgtatgaatgaataaactaaagcctgtcactgagaaggtgaaggccttgggacagaaaaacaagagaagttcctcttgtgcttggaaagaaagaaggaaaaccagagagagcttctgtgatattcattgcccaaattttaggtggtgggaaggaagctcactgagacttttgcctaggaagaacatttttgtaccgttgtgttttacctaatttgcctccattccagtaatgttgcagcaacgagggaggaagtttttatccttagctggtgtgactggccataaagcagtttttttggatcagtagacagttttgattagtgttgcatcatgcattgacagaaaattagtttttcgctttgcagaatgtgttgcttgagaaacagaagaaatagatacaatatttcaatgtttggtattgtgtttttatttttcagttaaatccagatgtgaatgttttccaacggaaatttgtgaatgaagttagaagatgtgaagaaatggatcgaaagcttcgtatgtgcactttggtcttgtgtaatgttcctttaatgaatcatttgtcttagattagtgacattagtcctcttaatagaggaagaaaatgttataagagaaaagggaaaaatcttgcagttaagatgccaaggtgtatttctcgtatacgagtagattttgtggtctttgggctaagtagtgcttaatggaaacctcgtttgaaataacatgctgcaaactgaaaactggttgtttttttgtgagattttaataacaaaactacatgatagaattttgagaaataggacccagcacaccatcagtttttgtcagcagagccaccttttaatttgagctatttaagagggaagaaactggctgggcccggtggctcacacctgtaatcccagcactttgggaggctgaggcgggtggatcacgaggtcaggagatcgagaccatcctggctaacatggtaaaaccccgtctctactaaaaatacaaaaaattagctgggcgtggtggcaggcgcctgtaatcccagctactggggaggctgaggctggagaatggcatggacccgggaggcagagcttgcagtgagctgagatcgcaccactgcactccagcctgggcgacagagcgagactccgtctcaaaaaaaaaaaaagggaggaaactaacatttatctaagttctcttgagggctaggttgctcatatacattactttattcattctccacaacattccttcaagatgggtattatcttatttaataattgaggaaactaaagattagagaggcttaatgacttgccctagatcataaacagttatgatggaatcagtatttgaagccaggttgctctctctggctcaaaagtccatgatcttgccactctactaagccagcttatggttagctgataagtgaatttggtccccactataaaaaacagttgtagttgttacctgaaacactcttctcttctggtattttgtgtccttattacctgttctgctttttcatttttgttttttatgcttaaaactgacctgattgttttcaaatttaatgaacccctttagatctagagttgtctcactagtgtgttaagtgtcaaatattctattgcattatactcttcttcataactctgctttgccaataatatctataagcagaactgtcatactttggagtggcattcgcgtatggaggagaggtgtggccttgaaggccagtgttaagacctgaagaaggaaagaaggcagttgtgggatgaccaccctttggagtaactttagagaatgtgaggaaggagaaagagggatggggagaaaaaaggtgcttctttcatattaaaagatattatatcttttatatatatatataaagtatcttttttgaataaaactttttgtaaccaggtcttagatgttaattcttttccttaaataatggcaattacgagcatgtgcagttagacatgaatgttttgattctgtcattttaggatttgttgagaaagagataagaaaagctaacattccgattatggacaccggtgaaaacccagaggttcccttcccccgggacatgattgacttagaggtaaacacttctgggaaaaccagaaaagtttctttctacttgaacgcagaaattactttcctgagcagatagagagtaaagtaattcttgctaactttgtcagcattatctactgattgtaagtttcttgtaggtgggattttgatagataatatttgtacacatttatggtgtacatgtgatattttggtatatacatagaatgtgtatataccaagtcagggtatttggagtatccatcaccttgagtatttaccatttctatgtgttgggaacatttcaattcttctcttctagctattttgaaatatatacagtacattgctgttaactataggcaccctactctgctattgagcattagaacttatgccttctatctaactgtatgtttgtccacattaaccaacctctcttcatccccccacaaacccacacacccttcatagcctctggtatctatcattccactccctacctctatgagatcaacttttttagctcccacatatgagtgaaaacttgtattatttgtctgtgccctgcttatttcgcttaacataatgacctccagttctatccatgttgctgcaaatgacatgattttattctttttttatggccagaccatatgaatcccctcttttatggtgacaaacagcactcaaacagtattatatgccactaagtaaatgtttattggtttatcgaaaccttattggagtaagttatctactattttattttattttattttatttttgagacatagctatcacctaggctggactacagtgaccccatcttggctcactgcaacccctgcctcccaggctcaagcagttctagtacctcagcctccagagtagctgagacgatagctgtgtgccaacatgcctggctaatttttttgtattttttgtagagatgggattttcccatgttggccagcttgatctcgaactcctaacctcaagcaatctgcctgcctcagcctcccaaagtactgggattacaggtgtgagctaccacacctggcctatctactagttggttaatcttgcaatcttgcagactaaatgggcagccagtagacttctcagtaattattttatccatctgaaatcgcctgagaaagttaccaagtatacaatagaatgtgtaaacaaagaaagactatttttttgacttctacaatgacttagaaaggaaagacttttttttttttttttttttttttccagacagagtcttgctctctcacccagcctggagtgcagtggtgcgatcttggctcactgcaacctccgcctcccgggttcaagccattctcctgcctcagcctcccaggtagctgggattacaggcatgcaccactgcacccagctaatttttttttgtatttttagtagagacggggtttcgccatgtttggccaggctggtcttgaactcctgacctcagatgagccacccacctcagactccctaagtgctgggattacaggagtgagtcaccatgcccggccaggaaagactatttatttatttatgagatggagttttgctcttgttgcccaggctgaagtacagtggtgtgatcttggcttactgcaacctccacctcccgggttcaagtgattctcctgcttcagcctcccaagtagctgggactacagtcatgcgccagcacgcccagctaattttgtatttttagtagagacgtggtttcaccattttggtcaggctggtctcgaactcctgacctcaagtgatccacccgcctcggcccaggagagattattttaagcaaaaaaatttccataaagaaaattgctctagtaaaatcacagtatttgctaggcaagtccaagttctctttgaactatcggcttggcaacagttctgtgggatgaattcatttaatgtctttcagagcaaacatattgagcttagcttaatatattttcttatttcatctaggccaattttgagaagattgaaaatgaactgaaggaaatcaacacaaaccaggaagctctgaagagaaacttcctggaactgaccgaattaaaatttatacttcgcaaaactcagcaattttttgatgaggtcagactattgtttcttttagtatttgagcagctgatattatactcacacaagtgggccatatttttattccagtaattattttaatttgctagtttggaagcaatgccatttttgcaccctgttttagttacagaaatgtgagattatgttccatttttcatgcagtacacaaccagccatggttttgcattttttcacattttcttcaatttttcatctcaatatgaggaaaagaaccctgaagtagttgtataaacatagttagtataaatttttacattatatttatacttataaggtaagtatatgcttaaggttaaagctgaggaagcaaacatttggttatagacaaaattataacaaaggtttaatcaccaaaccttttgtcatcaaatttttatttcattgtctatgtttgcttataaaccttcgagcacatttttcagtacttcagatagcacacatcacactaatttttcaagagtttttcattgtatttattgtatggaaaatattggtaggatgcttgtttgaaacttctggattatcacataaacttagacgcattacctcagagggaaaaatgttagtaaagttcttgggttaaatatgtaggtgaggccaggcatggtggctcatgcgtgtagtccctgcactttgggaggccgaggcaggtggatcacctgaggtcaggagttcgagatcagcctggccaacatggtgaaacccggtctctactaaaaatacaaaaactagccgggtgaggtggtggttgcctgtaatcccagctactcgagaggctgaggcaggaaaatcatttgaacctgggaggtggacgttgcattgagctgagattgctccactgcactccagcctgggcgacagagtgagactctatctcaaaaaaaaaaaatgtaggctgggcgcggtggctcatgcctgtaatcccagcactttgggagtccgaggtgggcggatcacgaggtcaggagatcaagaccatcttggctaacacggtgaaaccccgtctctgctaaaaaaatacaaaaaattagccgggcatggtggtgggcacctgtagtcccagctaatcaggaggctgaggcaggagaatggcgtgaacccgggaggcggagcttatagtgagccgagatcgcgccactgcactccagcctgggcgacagagcaagactctgtctcaaaaaaaaaaaaaaaaaatgtaggtgacttggttgggcatggtggctcacacctgtaatcccagtactttgggagggtgaagtgggcagatcacttgagcccaggagttcaggatcagcctgggcaacatggtgaaaccccgtctccacaaaaaatacaaaaattagacaggcatcgtggtgcacacctgtagttccagctactcgggaggctgaagtgaggggattgcttgagcccaggaggcagaggttgcagtgagcggagattaagccactttactccagcctgggggacagagcaagactgtctcaaaaaaaaaatgtaggtgacttagtccaggtgacaatgtgctgaggtgactccatggaaaggatctggagcaaggcttccagaatgctcccttctcctaactcagtctggggaggagtcttagctttcaacttggatgtggtttttctgatggcctaaagtacagtaactgtcttcttgacaggtgtctttgccaccagattgacaatattagacactttagggattgttacagtcactgttcaatgtgccttcccataaagttctttcattcctttgctcaacaagaaaacttggcaaagcttttaaatatagaggccctttttttttttttttttcccgagacaaagtctcactgtgttgcccaggctggagtgcagtggagtaatcttagctcactgcaacctccacctcccaagctcaagcaattctcctgcctcagcctcccgagtagctgggattacaggtgctcaccaccacccccagctaatttttgtattttcagtagagacagcgtttcaccatgttggccaggctggtctcgaacctctagcctcaagtgatccatccacctctgtctcccaaagtgctgggattacaggtgtgagccactgtgcctggtagagtcccattttagttagcatctgctgtgttctcagttgtactttaaatttatatatatagtttttatttttattttttattgtttttaggccgggcgcggtggctaacgcctataatcccagcactttgggaggccgaggcagggggatcacgaggtcaggagttcaagaccagcctgaccaacatggtgaaaccccgtcttctactaaaaatacaaaaattagccaggcatggtggcgggcgcctataatcccagctattcatgaggctgaggcaggagaatcgcttgaaccggggaggcggaggttgtagtgagctgagatcgcaccactgcactctagcctgggcgaaagagcgagactccatctcaaaaaaaaaaattgtttttaactgcctcatctcagaaatttttctcttttgaggggagatcaaatatccagaattctctagactggagcaggggtttttcaaacaacagcagcagactcacctgtaatcttgtcagaagtatgaattatcagtctccaccctagacttactgaatcagacactgtgggagttaggcctagcagtctgtatttactaggtgatccggaggcatgctagtttgaaaactgctgggctagagaaggtctgctgaggatgtgatacattcctcactaatttaaggatttgactcagaagccatttaattaaaaggatctgctgggtcaagggaaaggggaaaaactcatatgaatttaattgcctggtcctttcaagagtcagaaggtacaaatatttatttagtttgctcacagagtcgagaattttgagactagtggtaacttctttcgccagtccctaatgacatcacgttagagggtgtgggacagtgtgattaactctaagtgtttaaggtcttttgcaataggcatcgccacttaagctgtatgtttttaatgaacctggaattccagcatgctcactgcccagacgttattgtatttttgttcactaattcactgagcatataatgagcacctacttattgtgagacacaagatgagtaagacatggtccctgtgtttaaggaatgtatcattcagtcttaagaaataccccagaacatgacgctttcatatgctcacagatgtgtgcttttctaaacatatccaagctgctacccacagatctgatgtaaacctggccttgtagtcagagctcagctaccttttagcattatttggagcttaattcttttaccttccctgtccccatttttttcccttttgatatactgtttagtttactgctgagatattgctatctcatatgaaaatgtctttcaagacctcgtaagtttaagaatgagagccagcttcctattatggttcatttttggagaaattccgaataaagactgatagatggattcccttaagggaaataattatttaaactattaattttctaatgaaaagaacttagtaaaaatgaaaataagaggaaccacttggaaaaatgatattttaaaatcataatttatggatttaggacttttattttgtgaataataagtctaaacactaaatgcctgttttgagaaggcagactctaagtcttcatgatctttgtgcccttttcatgctggggttgttttccctctcctattttttttttttttgagacagagtctcgctttgtcatccaggctggagtgcagtggtgcgatcttggctcactgcaactgccgcctcccgggttcaagcgattctcctgcctcagcctcccgagcagctgtgactataggtgtgtaccaccatgcccagctaatttttgtagttttagtagagacgggcgtttcaccatattggccaggctggtctcgaactctgacctcgtgatctagctgcctcagcctcccaaagtgctggaattacaggtgtgagccaccgcacccagcctccccctcctattttattcaaaactttttttttttttccagtctctggaagtacttagagcacaagaccgtggctatgagaggttcttatgctgcttttgtcatcaattccccttccattcccagcagtctcactgcattgcaagtctcctggcaagaacctctctgccttgcctgttcttgcactagctcacagcctcagccaggttcctttccatagaccttgccctgctgctgcgtagcagcaggctcaggtgtcactgccacaactttgcatctgcacatgcgcgtgcacttcaaataatgcgaaagataggacacttgggaccctcaaatgttggaaacttaggatttttaatgagattttcttctgtgtctgaaattataatatttgcaaagggcctaaaacactaccagttttaaaccccttattttgtgtaatttggtgactataatcaataattcacagtaatgagttagcagaaatggctaaatcagaaaatgattctatatttaggcataggagttatgattggcagggtgtgtgtaaggtgaaaaataaacatattgaatagtcttatgattaaagatgattacaaatttgacttagtcatttcttatctagggcatttaaaatgacttgttaatgattatccttttctaagtcttcttgcttatgaagaactgtaagagctggagagatttctctgcatcttttaccataagcaccataacatatgagaacataaagaagactggaaaagtaatggttaatggcatgcagattccctgctttcctttccttctcagttttccatccatctgctttctttatttttttcccatctgccatttcctttggggcctaggtgaataccttaagtaatgaaatataatttttttctcgatgtagatggcagtaattgtttgttcttggtaattgacatagcttgaactggatgtgctatttatacttaattgctgtagaaacagaactgaagttcttctacttcctttttgtaaggcgtggttttcagtatctgaatggagaaaccagagggcatagcagtaatgtagaggcatattcacaatgttgttattagagaacccagatacccttaagacaagcttgtccagcccatggccttcaggcctcaggacagctttgaatgtggcccaacacaaattcgtaaactttctcaaaacattatgagatttttttggaatttttttttttagctcattagttatcattatagtgtattttatgtgtggcccaagacagttcttcttccaatgtggcccagggaagccaaaagatcagacacccctgctctaagatttagatactttcaaccacatggttttagatactgctttaaaggccttcagttagtgagtggttctagtcatcctagtttctcaccaggcacaattttacttaaaaatttgtaacttttctctctaagatagaattcttaagtatgaagtggtgaaattagcaattcaaatattatcgcaagtttctgttgaattttaattttgttgttttttattctcagagagtcctagatagagtctttgaagtggtctagttgctaagtactgtttgcttttccatcagttagagcacatgtgtttgcattgagtccgatatttagggttgacttaaaccacgtcttgtgagacaggcaggcaagtaggatggagtcttgtgagtagtcaggctcactggtttttgccaagggataaaccaagaacaagttgaaatgttgtaatcatcgggatcctgaaaacaagttgcttgtagtcagctgatttgattgcaagtagaaaccgaaagaaccccctcaacttacatgtaacagccagtggtaactagtgtctccatgatctcatcttaaacttttccaatctcatgacagtatttctctgcacttctggtgttgatccttacttcccaaaatgattgctttctattttttaggccttcagacttatcatctggtttatacacagtttttccccctttttgctatgtttatgatcccatgactttatcaagttatggtccctgtgccactttttaagagtgtggctgacaggggtagaatcaaattgaaatttggaatgaaaatgatagagaaaaactcttctgattttttgtcttattgtgcttttgaagaggatgattgttctggtttactcctagtttttggtcaaacaagtattgcctgggtattagagttggggagatgaggcaatggagaagttgattggactggtttttgttttgttttgttttgttttgttttttggagcagcttctcctttctgatgggagtaaagggtggtaggatgagttcggtagagagaggctaggaaatgtagacctgcgtgtgggaagatccttcttcatttcattgtataaactgtcatggtggaagtcattttaaatcttaccaattaaaccagcccatgaactctagtttggtttattatctgttgtttttccttcactttacttgattcttgagctgtgttctcaagaatcctacaactgtaaagcctatgtgaacttatttagaagattcctagtcagaaaatgggacattcagatatgtttttacaggcctgcccagctattgtgcttcttatccttttgaagacataaatactctttaaatcccatggcttggatcattctataagtggccatgctgaaagttctcatattctgaattttaaaggggctggaaacgtagatacctggagcttccccttctgtctttctccagacttcacagcattcaaagacagtggcagtgccttgcttcttccttggaaagagagcctctatctttcacattctcacgtagggaaaattctagtttgtagctgcctagaaattaaatgttcagagtatctgcagagtctcttcattattgcacagaaagaagagatattttagcttcctatctacatgcagaggtatttcctggcactttcatcattcattcagggaaacgtaggagagaaaatggcttccaccaagtaacagatttatacatgtcaccatcacttaattttttttccttttgctccttatttctaaaaccatttccccagatgctttactggggcaattatgctttctttacctcaaatttattttctgtgttttcatcccctattcttcttgtctttttatggatatatcttgtcttttcgtggtttgttttctttttcatccttattttctgaacctgtctcctggttcctcgttgcctgcatgccactaactattttcattagatattaattgatttgtgaattcaggctgaattgcatcatcagcagatggcggatccagacttgttggaagagtcctcatccctcttggagccaagtgagatgggaagaggcactcctttaagacttgggtaagtgccatgtcaacttttcggtattcagtggggccatgttcatctcttctgttcagaagagcagtgagactggggattcacttgctaccaggatatgccctcttctgagcctattgagatagtcctacaactctggattcatgcctgagttgctctgtcagctctctgctgggtccataagtgaagctgggaataagacttgtattaaaccaacccaaatgtccatcaatgatagactggattaagaaagtgtggcacatatacacaatggaatactatgtagccataaaaaatgatgagttcctgtcctttgtagggacatggatgaagctggaaaccatcattctcagcaaactatcacaaggacaaaaaaccaaacaccacatgttctcactcataggtggaaattgaacaatgagaacacttggacacaggaaggggaacatcacacaccggggcctgttgtggggtggggggaggggggagggagagcattaggagatatacctaatgtaaatgacgagttaatgggtgcagcacaccaacatggcacatgtatacatatgtaatgaacctgcacgttgtgcacatgtaccctagaacttaaagtataataaaaaaagatatatatataaatataaataaaaaagacttgtattaaaaccttccatcccatgacatggaatagagtttccaatctgcctcttctccccacagcttcgtggctggtgtcattaaccgggagcgcatccctacttttgagcgcatgctttggcgggtatgccggggaaatgtgttcctgcgacaggctgaaatcgagaaccccctggaggatcctgtgactgtaagacaaggagattgcatcctgtggagtaggtcttgtaaagggagcccagagcagtaacgtagcatggggccacctgaatccagtgcttccacagaggagccattatctttatctctgctctaattggagaatttgaagtacttcctcttagttaattcctgtcatatatacatatggatgtatgatgtatacatgacatatacatattttcaagtttacccgtgtagatgttattctgattggaaatttttattttcactcatttgccttttatgaaaattaactttaaagcaagacatctggttccaaatttggtaatttttttttttttgaggtggagtctcactctgttgtccaggctagagtgcagtggcgcgatctcggctcaccacaacctccgcttcctgggttcaagcgattctcctgcctcagcctcccgagtagctggggattacaggcatgtgccatgatgcctggctaattttttctgtattttcagtacagacagtgttttaccatgttgcctaggctggtcttgaacttctgatctcaagtgatctgcctgcctcggcctcccaaagtgttgggattataggcataagccaccatgcccagccccaagtttggtaatattcatgtataaaaagagaaggagagatttcctagactgtgatcttaataagctgatgaaattttacttggtaaagtttttttgtttgtttgttggaaggattagaaacttagtttaagaatagatatcgcacaaaataggatgatcttccccacccagtacttcaggaagtagaaacagtttaacatcctggcatttgccataatgggacagagtttatcgtctaaacctgcatttaggtatggtgagtcctgatttcagggagtaccagtgaagataaatgtactgcaaaaattttgctttgcttttgtactagtattatttagaaacctaaagttagcttttctgttctaaattatcttgtgaatttcttaaattcgtgttctttacctaaaaagagagagattgaattgtgagatttctcagattgggtgggctgtgcagctgcaggtctttcatcctccatgccgtggaggagtgtggttacacttcaggtgaaccccctgcctaggggtgtagtttcacaatcttgccaaaggccatcaggttgtggaaacgttgtaatttgtagtcacattaatgaggaacttttctcaggaatattcagtcaagtttcctcttggcaacagaaaggttattttatcaacaaatccagaaatggggaccctggatatctgtaacagagcaggctgcacaaagaatgggttctagtttagcctacagaatttagggatttcagacccttgagcccaattttcttcactcctcatccccttttatccttctaaagttttgtttgttattataaaagctctacatgctgtgtatgactatgagaaaatacaggcaacctgagacaatcctggttaacacaccatacacctttttttctgatctttccttccagtccttgcatcatacttcaggtataaatttggtatttggaatggattaccttcctccctgccccataaagtccagattagcttgaattgtgagattctatatcagcattctttccagggactcagttccttgtagttattcagccccttttatctaagaatttctaagtcccagaacaggcagaaatggcttccttctcttttctctcctatactttcatcattcaggcaatataagatttaaagctgaattggtaaataagtctaaacagtgctaagaggagcatcatcttagcttcaagctcctggttgagtcaaaaaaacaaatagagaaagatttttgtgaattagagattatagggcagatgttcttgtagtgaagcttaggaaatggagtgagggcagtggttaaaatgcaggactgccatgtccttaaaagatgcctgttgttcttgcatcaccaaaaaagtgggttatttaagagattttcatccagatacagaagtctgaactcttgtttttttattctggggcctagggcgactacgtgcacaagtctgtgtttatcattttcttccaaggcgatcagctgaaaaacagagtcaagaaaatctgtgaagggtaagagaggcatgcctctaccaggagtgcacagccatgctgcccaactgttgagtcttaaagttcacaatagtgaaatacaaatcctttttagtctacctcaacacagttaattttaataatgttaggggctattttaatcaattagaaatagcctgcattcatttttatttttatttttgttgttcagatgggggggtctcactctgttgcccaggctggagtgcagtggcatgatcacggctcacggcagccttgactgcctgggctcaggggattctcctgcctcagcctctagggtagctgggactacaggcgtgtgccaccatacctggctaattttttgtattctttgtagagacggggttttgccatgttgcccaggctggcctggaactcctggactcaagggatctgcccatctcaacctcccaaagtgctgggattagaggcgtgagccactaaattctttttctcttttttttttttttctgaccgagtctccctccacgcccaggctggagtacgatggtgcgatcttggagcactgcaacttctgcctcccaggttcaagtgattctccagccacccgagtagttgggattacaggtacctgccaccacacctggctaatttttttttttgtatttttagtagagatggggtttcgccatgttggccaggctggtcttgaactcctgacctcaggtgatccacccacttcagcctcccaaaatgctgagattacaggtgtgaaccactgtgcctggccctaaattcattttaaaaaataccatcagaaccacagttgtggccagatacaatggctcatgcctgtaatcccaacactttgggaggccaaggcaggaggattgcttgaccccaggatttgaagaccagcctggccaacttagtgagaccccatgtctataaaaaactaaaaactgaaaaaaaaggaccataatttccttaacttggggaaaaataactcttaaggactcatggtttataaatgccatattattctgggacagtgagtctccatacttagcatagatgctatgtccttaaattttctgaaattctgccttagggacagatcttttttttgagacagagtcttgcgctgccacccaggctggagtgcagtggcacaatcacagctcactgcaaccttcacctccagggttccagcgattctcctgcctcagcctcccgagtagctgggactgcagatgcgtgccagcacacccggctaatttttgtatttttagtagagatggggttttgccgtgttggccaggctgatctcgaactcctaatctcaagcaatctgcccgcctcagctctcaaagtactggtattacaggtgtaagccactgtgcctggccttttttttgttttgtttttgttttgaggcagggtctcactctgttgcccaggctaaagtgcagtggcatgatcacagctcactgcagccttgacttcctgagctcagttgattctcccaccgcagccccatgagtaactgggactacaggcatgtgccaccatgcccgactaatttttgtattttttgtggagatgaggtttcaccatgttgctcaggctggtcttaaactcctagactcaagcaatccacctgcctcagcctcccaaagtgctgggattacaggcgtgagccactgcacctggtctaggggcagaattttttccatgccatcttactccgttaatttacaatataatttgctttactttttttttttaatcacaaaggaatttcatagctacagagaatgtcaagatagttcggatgctataattgctccgtctgcaggtcattttacgtaagtgttgacttaggctgggcatgatggctcatgcctgtaatctcagcactttgggaggccgaggtgggtggatcgcctaaggtcaggagttcgagatcagcctggccaacatggtgaaaccctgtctctagtaaaaatacaaaaattagccaggtgtggtggcaggcgcctataatcccaggtacttggaaggctgaggcagaagaatcacttgaacccaggggcagaggttgcagtgagctgagatcgtgccacttcactccagcctgggtgacagagtgaaactctgtctcaaaaaaaaaaaaaaaaaaaaagtgttgacttaatacatcggtctgacctaatcctgttttggtccttctggtacattaggattactttctgagattatttaaattagataagttaagaaacttcgatgttcttatattccaggttccgagcctcactctatccctgtcctgagacaccacaggagaggaaggaaatggcttctggagtgaataccaggattgatgatctccaaatggtatgcagaaggctggagggaatttgtttttgtgaaatactggaatacgagaccattatccttccttgaaatgctgatattctataaggtacctgtagcaaaccaggataccaaaaaaagaaatgtacatgggtaatatgtccttctgggagctgagaaagtatcagggaatgatggttaaaaatagcattagccatcctcaaacgagacaggaatgtaaagcatctagaatcgttgttgcctagcatattcaattcctctccacctcatgggtctgagattttttttttttttgagacagagtctcactctgtcacccaggctggaatgccatggcgctgtctcagctcactgcaacctccgcctcctaggcgcaagtgatgctcctgcctcagcctcctgagtagctgggattacaggcatgtgccaccatgcccgactaatttttgtatttttatttatttttttgagatggagtcttgctcttttgcccagggtggagtgcagtggtgtgatcttggctcactgcaacctctgcctcacaggttcaagcgattctcctgcctcatcctcccaagtagctgggatgacaagcatgtgccactaaacctggctaatttttgtatttttagtagagacagggtttcaccatgttggccaggctggtctcaaacgcctgacctcaagtgatcctcccaccttggcctcccaaagtgctgggattacaagtgtgaatcactgtgcctggcctaatttttgtatttttagtagagatggggttttaccatattggccaggctggtcttgaactcctgacctcaagtgatccacctgcctcagcctcccaaggtgctgggattataggcgtgagccactgcgcccagccaagtctgagatagttttttttgttttttgttttttgttttgtttgttcgtttgtttgtttttgagacggagtctctgtcacccaggctggagtgcagtggcgcgatctcggctcactgcaagctccacctcccgggttcacgccattctcctgcctcagcctctcgagtagctgggactacaggggcccgccacacgcccggctaattttttgtattttttagtagagacagggtttcaccgtgttagccaggatgatctcgatctcctgaccgtgtgatctgcctgcctcggtctcccaaagtactgggattataggtgtgagccaccgcgcccggctgatagtttttatgataataattttttaaaagtatgcttagttaagacaaatatatatcaaacaatctaaaaatacatgagtagtcagttctgccttctcccacacaccctcctgaggcagctggtcccaatagctcggcatgcatccttgcggtcacctttgatcttaaccacacagactagccaaaaagctctggtgtgacttttgtacccaagaagagactgtgttggagttttgccaaattgcagtaagtgtggtttatgcacaccacggttatcacagggctctgagggaggagttgtgaactgtgtgtacatggaaggaaaggctggtgagtggggctttgttccctttgaaagaatgaaagtgatgattgcccccttagaatattaataaacatacttaatcccaaaggcagttccttttggcagtggcagaattgtcaggaattgtcaggggtatgttgtaacttccatttcttttttcttttcttttctttttttttttttttgagacagagtcttgctctgtctctcaggctagagtgcagtggcgcgatctcggctcactgcaacctctgcctcacagattcaagcaattctcctgcctcagcctcctgagtagctgtgattacagatgcctgccaccatacctggctaatttttgtatttttagtagagatggggttttgccatgttggccaggctggtcttgaactcctgacctcagatgatctgcctgcctcggcctcccaaagtcctgggattacaggtatgagccaccgtgcccagcctgtaacttccattttaactctcagtgacctccatcatatatgacccaccaacctgacctattgctggctcctttgagatacacttaacctgtttaagcagagagagagagttttagaactgctggtgagtgataggctatattagtatattctgggttctaaggctgtcttaatctccttccagacctatgggtagatttaaagagcatatgtggtagtcattataactgaccagaatttgattttttaaaaatctagctgtaggaactgaaagtttaaaaagggattgaataccaaggaatgggatgaggaaagagaacggcaaatagaacattgcttgctagtttctttagcatccttctagaagaagggttttttgtgttttgtttgtttgttttgttttgttttgttttgttttgttttaaagacagatctcactctgtcacccaggctggaatgcagtggcacaatcttggctcactgcagccttgaccgactaggctcaaacaatctgtctcagcctcccaagtagctgggactacaggtgcctgctgccatgcccagctaattattttttggtatgtttttgtagagatagggtctcactatgttgcccaaactggtctggaactcttgacctcaaacaatcctcctgccttggcctcccaaagtgctgggattacaggagtgagtaatagtaattgtgaaatagtccacaaccagaaggaaagaaagtagctatcttcaagtgatgtgtttcctagcatgacatggctttgcttttaaaaacaaagcaaaacaaaacaaaggaagtcaccttcctctgcccaagacaatttttcagggagtagttactgctttgttctgaactaacttgaagaattgtctatgatggagacttgtgctttgggttgcttgcctaatttcttccagttggaagcaacaggcttagccacacctgctattaaaaacttaaatatgggctggacatgttggctcatgcctgtaatcccaacactttgggaggccgaggtgggtggatcacgatgtcaggagttcgagaccagcctgaccaacatggtgaaaccccgtctctactaaaaatataaaaattagccgtgcatggtggcgcgcgcctgtaatcccagctactcaggaggctgaggcgggagaatcgtttgaacccgggaggtggaggttgtggtgagctgagaccacgccactgcactccagcctgggccacagagcgagactccatctcaaaaaaaaaaaattaaatatttggtattaagccagtggaatgtaaaatgttcctgtaccttcctcccaccttagtcttggcactgtaattcctctgagggaaatctgtactgatttcaaaaggatcaacactgaaccattttttcctctgatgagaagcctgacataaaggtaacaccttagctgccctcatgatggcagtggtatgtggcagtccaagccccctgtaaagatcacaggtgctcctgatcccatggcgtctcctggcccatgttcccagtgtaggctggtggtggtattcagcactgcctctttccaccctctcctgatgctggcccatgtgcaaaggattctgtgtggatttgttaatttgtcagctcctgggcttgtgatgcctactgagttacattccccacatagaaagtcgttgctctttaataagccaagttaaaggcagtgacctacatttgttgtgccttggattggtggtaagattgaacatatatagaaaagctaaactattttctcaggtttctttttaggttgaagctaaataaaagtgaatgttagtaactagaactctaatttcttgtaatttggaaaaaagaaaccattctagccagaggaagaaaaagacaattccctggcaactcttttcagaaagctatgcctctttgccattcataccctgagatctaaaactggtgttaaaaggatccctcgcttgttccttttctccccaaaggttctgaatcaaacggaggatcaccgccagagggttctgcaggcagctgctaagaacatccgtgtctggttcatcaaagtgcggaagatgaaggccatctatcacaccctgaacctgtgcaacatagatgtgactcagaaatgcttgattgcagaggtctggtgccctgtcaccgaccttgactccatccagtttgcactcagaaggggcacggtgagtccccaaagctaacaatgcagctcgtggcccggaagagaggttcccatcaatagtaacattaatgtcatttttggccgggcgcggtggctcatgcctgtaatcccagaactttgggaggccgaggcgggcagatcatgaggtcaagagatcgagaccatcctggctaacacggtgaaaccccgtctctactaaaaaatacaaaaaattagccgggcgtgttggcaggcgcctgtagtcccagctactctggagactgaggcagaagaatcaagtgaacctgggaggcggagcttgcagtgagctgagattgcgccactgcattccagcctgggcaacagagcgagactctgtctcaaaaaaaaaaaataataataaaaaataaataaatagtaacattaatgtcatttttatggcatttcaccttcagagttcttcaatatatttatttgtcttttaacttgacagcacatttcatacatagcctggcatataatatgtatatcatagcgtagcatagcatatctttattttgcatatgtggagactgcagttcagagagctgaaataatttggtcatatgcccatgattcttcagggttgttcatggccagggcatcagtttcctgatgccctctctgtatatgactgtttctgtttagtagttaattagaacaactactctgtccacagaagtgctgtaagtgcctggaggagtacagagatgtataaaacatgccctcgagtatcttacagtttattaggagagttccaactatggagttggaaaaagctttaagcaggtggcatttgatcaggtctttgaagaatgataagttgttggtaagactgctgaatgaagagaagaaaacaaaggcaggaagtatggttagaccatgtatgtttggacaagaacaggatttacagtgggttagctgaagagaagtacctgtctgcatcaggtagtttggaacttaattgtgaaaggttcttaaataatagcttagaagatttaaattttattccagaggaagttgagagacattggaagttctttaggggtaaaggaacatgatcaaagcagtttgggtggttttttacatttttaattttgtgtttgagacaagatcttgctctgttacccaggctggagtgcagtggtgccatctcagctcacttcagcttccaactcctgggcttaagcaatcctcccacttcagactcccggtagctgggactacaggtgcccaccatcatgcgtggctaattttttgtagagacagggttttgccatgttgcccaggctgatctcaaattcctgggctcgagtgatctgccttccttggccttccaaagtgttggggccaggcgtggtgactcactcttgtaatccagcactttgggaggttgaggcgggtcatcacttgaggtcaggagtttgagaccagcctggccaacatgacaaaaccccgtctctactaaaaatacaaaaaagttagccaggtatggtggtgggtgcctgtgatcccagctactcaggaggctgaggcaggagaaccacttgaacccaggaggcagaggttgcagtgagctgagatcatgccactgcactccagcctggacagcagagtgagactctgtctcaaaaaaaaaaaaaaagtgggtcaccacgcctggtggatcaaagcagtttttttgttttttggtttttttttttttgagatggagttttgctcttgttgcccaggctggagtgcagtggcatgatctcggctcactgcaacctccaccctccacctccctgcttcaagtgattctcctgcctcagcctcctgagtagctgggattacaggtgtgcgccaccacacccagctaattttttgtatttttagtggagacggggtttcatcacgttgaccaagctggtgtcgaactcctgacctcaggtgatccacccgcctcagcctcccaaagtgcagggattacaggcatgagccacttctcctggctcaaagcagttttaaaagagtaatctgctgatagtatctaggttggattgaggagtgaagagattctgtaggtaggggttcagttaggaggttattgtagacatagagtagtaaatgataaggatccccaggtaggacttgacaatgggaaaaaaaatgatgaattgtgagatgttctgcaggaaaaatcaatagggctacctggttcctagcaaggtgcaggagaaatacaaggagaaagatttaaacatctttttgaggcatcaaagctgactggccaggagaattagggttccaatgagggaagtaaatgttcagccagagaagcttattgattggggagagatggtaagttcagttccgggcacattgaggtctatgtggaaatgtcaagcagacaagggaacaaagctaaggaaatgggagtcatgagaatggaagggaatgagacctccaagagggaggtcatagagagaaaaaaaaggttggggtcttgcaatgctatgagataggcagagcagaaataaccagcaaagatagaaaagcaatggtcagcgagcaggaggagaactcctaaggaagaaggattttcaccaaagatctccaatgtcaggggcgtgcatgggggagagaagctctttggtcaggagccagtcactttgcctaagcatgctcagccagactgcaagggatcaggaagttaagagaaggtagtgaagaaggagagccagagaacatactttgctttctccatgaaagggggagaacaactttcataaaaaggcagatatggaggcagttccacattttctttggtgacatattttaaagttaaatttttttcacattaaggatgtatttcagaggatctaatagaaatcttccattataaatgttataccttttcccagttttcccaaaagctgggaaagataatctagttttatttttaggtttattagttttattgagatataatttacatgaaagaaaatacatacattttatgtgtaccatttgatgagtttcaagaaatgtacacctgtgtaaccactaccacaattaggaggataacctaagtttgataaatgtgctaatgtttttcaggaacacagtggttccactgtaccttccattttgaacaggatgcagacaaaccagactcccccaacctataacaaaaccaacaagtttacctatggctttcagaacatagtagatgcttatggaattggaacttaccgagagataaatccaggtaaaaaaaagcttgttatctttttcctctagagttttttttgtttgtttggttggtttggtttgttttgagacagagtctccctctgtcacccaggctggagtgcagcagcacgactgtagttcactgcagcctcaaactcctggcctcaagagatcctcccaactcagtctcctgtatagctaggaccacaggcgcacagcaccacacctggctaattttttattttatgatttttttttgactgggtctcattctgttgcctaggctgtagtgcaatggtgaaatcacggcttacagcagcctcaacctcgtgggctcaagtgattctcccgcctgaacctctggagtagctgggactacaggcatgtgtcaccatgcctggctaatttttaaaatttttttagagatgggttttgctatgttgcccaggctgataatttttaattttttttagagacggggtcttgttatgttgcccaagctagtcttggactcctgggctcaaggaagcctcctgcttcagcctcccaaagtgctgggattacaggtgtgacccactatgcctggcctttttgttcattgtttcttctaatgcctcactttaaatgctgttgaataactgaattaaaattaaagatgttaatcctagcactgtttttttaatttaattttatttttaattttttttgagacggagtctcgctgtgtcacccatgctggagtgcagtggcgtgatcttggctcaccgcaagctctgcctcccaggttcacgccattcttctgcctcagcctcccgaatagctgggactacaggcacccgccaccatgcccggctaattttttttttattttttttaggtgagacagagatttactctcgttgcccaggctggagtgcaatggcacgatctcagctcaccacatcctctgcctcccaggttcaagcgattctcctgcctcagcctcccgagtagctgggattataggcatgtgccatcacgcccggctaattttgtatttttagtcgagacggggtttcaccatgttgcccaggctgatctctaactcctgacttcaggtgatctgcctgcctctgcctccccaagtgctgggattacagacgtgagccactgcgcccggccatttttttgtatttttagtagagacagggtttcactgtgttagccaggatggtctcgatctcctgacctcatgatccacccgccttggcctcccaaagtgctgggattacaaagtgctgggtggcgtgagccactgcgcccagccaatcctagcacttttagaggccgaggtaggaggattgcttaagcccaggatttcaagatcagcctgggcaacatagtgagaccccatctctattaaaaaataaataaacatgttgacacctcagatcttgtgtactccctgtgaagaggtgctcattctggcagggcatggtggctcacgcctgtaatcccagcactttgggaggctgaggcatgtggatcacatgaggtcaggagtttgagaccagcctggccaacatggtgaaaccctgcctctactaaaaatacaaaaattagccggatttggtggcatgcacctgtagtcccagctactcgggaggctgaggcctgagaatcacttgaacccaggaggcaaaggttgcagtgaaccgacatcatgccactgcactccagcttgggcaacaacaaaaagatgcccatttaatgtaaggggcaggtttactgtcaggtagcgttcctttaagagttcatcggctgggccaggtgtggtggctcacgcctgtaatcccagcactttgggaggccgaggcaggtggatcacctgaggtcaggagttcgagaccagcctgaccaacatggagaaaccccgtctctactaaaaatacaaaatcagccaggcatggtggctcttgcctgtaatctcagcgactcgggaggctgaggcaggagaatcacttgaaccggggagacggaggttgccgtgagccgatattgcattattgcactccagcctgggcaaaaagagtgaaactctgtctcaaaaaaaaaaaaaaaaaaaagttcatcggctgggcgtggtggttcatgcctgtaatcccagcactttgtggggacaaggtggaaggatcacttaaggtcaggagttcgagaccagcctggccaacatggtgaaaccctatctctactaaaaatacaagaaaattagccaggcctggtggtgcatgcctgtaatcccagctactcaggaggcctagacaggagaattgcttgaacccaagagacagaagttatagtgagcctaaattgtgccactgcactccagcctgagtgacagagcaagactctgtctcaaaaaaaaagttcatgagactggattctttcatgtgccctcacagccctaaaacacctggacttctctagcaaatcatttgcaggaactgttttaagcaaaatgtttcttctaagatgtctgatatttttaaatggctttttttttggcttccctgttccaaggttagacagaaaaaatgtagcaagtattggccactttaggtacaacacagatttctcctatatttggagagttaattattaaatcaagagtgtgagtattcattttcagttggagccctatggaagaactgctttgctctgggctctctccatctgtacgttatctgatatttagctttatatcactgggacatggttgctgcacaaagagaagacagctggcctgccctgggagcagggtcccacgagttacaagagagtcagagaacaaaccaatgttgtcaaggttacaccttcatttccactgttctttgtttgaaatgttatcagagctgccaggcacagtgcctcatgcctgtaatctcggatattcaggaggctgaggtgggaggattgctcaaggccacaagttcaggactagcttgggcaaaatagtgagattccatctaaaaaaatattatttatcagtaattttaaaacaaaattaactgggcatggtggcacatacttgtagttccaactgtttgggaggctgaggtgggaggataacttgagtccaggggttgcaggctgcagtgagctgtgatgaaaccactgcactccagcctgggtggcagagaaagaccccatctctcttttaaaaaaagttatcagtagctcaaatttcattagctactttgtgaagatgtgttgattctgccatgaaagattttctctgagagtcctatctgtctggcagctggggagtaagtcaccttatattgatcttaagattatggaagcctgggcacggtggctcacgcctgtaatgccagcactttgggaggccgaggcaggtggatcacttgaggtcagagtcggagaccagcctgggcaacatggtgaaaccctgtctctactaaaaatacaaaacttagctaggcatggtggtgggcacctgtaatcccagctactcaagaggctgaggcaggagaatcacttgaacctgggagatggaggttgcagtgagccaagattgagacattgctggctgacagagcaagactccatctcaaaaaaaaaaaggggggtgggtatggaaaagaatgtaatatttgtggaattgctatggtttaatgtactttgtatttttctttttttggtttcttcatagctccgtatactattatcacgttcccttttctatttgctgtgatgtttggagacttcggtcatggcattttaatgaccctttttgctgtgtggatggtactgagggagagccggatcctttcccagaagaatgagaatgaggtaatgtttaagttacatctgcattgaactgaaattttataatttcccaagcattcattatgaaaattatgatctggaagtcttttatccatgaatttatcaaaaggaagtagagaagttatgttcattttaacaccaaagacgacatgtgcaagctggaagtggtagtgtgtgcctgtagtcccagctacttggaggctgaggcaggagaatcacttgagcccaggaattcgagaccagcataggcaacatagtgagaccccatctctaaaaaaataaaaattatttaggtttggtgcaaaagttattgcggttttggctgccaaaagaaatggccaaaaccgcagtaacttttgtgccaacctaataaaaaaatagaggccacatcctgtgaaagtgactgtctcattagcattgtattttggtttttacttcaagctctctgaatcaggatggggtaaagtagtgctggagaaaggggcaggtatattctgaataacattgtcacaatgtgagctgcagtgagtacattctcattacttctttcttctggttcccagatgtttagcactgtgttcagtggtcgatacattattttattgatgggtgtgttctccatgtacactggcctcatctacaatgattgcttttccaagtctcttaatatctttgggtcatcctggagtgtacggccgatgtttacttataattggacgtaagttgcagaagaagctaaaattcaaagcttattcctttcatgtgcagccctgatttttaagacaagtggtaaactgacacttctttaggaagtggtgacagtgtctcctcattcatgctccacactgtgagttgctttgtgatttgttcagcaagtatccaggaactaagattagaaatgattttttttttttttggaaactaaaaccagattccccagttccctacttgattgtgtgtttgtgtgtttaatttttctttttgtcattttggatccctcagtctcagctgctagtctctcctctttatttttcccctcccattttattgaagagacaagatagctacagtaatttattttggggtcagtttctggacccttgttgtttccctctcttgttcaaaaataatgtgactttttccctgtcatggtagtgaagagacgcttcgggggaaccctgttctacagctgaacccagccctccctggagtgtttggtggaccatacccttttggcattgatccagtaagaggacttccttcctatatgctaacctcaaattttttaacactaaccctgaagcaagagaattaaaatgaagataaatagttatgtgggctttcactgggcatggtcgctcatgcctgtaatcccagcactttgggaggccgaggaggtgggatcacctgaggtcagcatggtgaaaccctatctctactaaaaataaaatattagccgggcgtggtggcgcatgcctgtagtcccagctacccgggagactgaggcaggagaatcgcttgaacctgggaggcagaggttgcagtgagcaagctgcactccagcctgtgtgacagagcaagactccgtctcaaaaaaaaaaaaaaaaaaaagaaagaaagaaagaaacaaacaaaaatagttatgtgggttttcgttgacatatttttgggaaaccttgatgtatgtattcagaggacttctaagccataagagacccaagtgccttgaggagccacatacttttccctgcgctgcttatttctgaggtggttaataatatcgactctgggaagattgatttttcaagactccttcccatttcttaatttatttctgcttacttagtttggttttttatttttagcagacattttagcaaagcagaaatatatttttcctgtggattttagacttgcattcttatatttacgaacttacaaaaacttatccgagaattaatttttttttcaaatgcttaggcaaattaagtatgatcaagtcttctttattgtgtgctgtaaaaatggagtggcggcaagaatgtaatacagggcatctgactgctgaggaaaaaaaaaaataatacaggctgggcgaggtggctcatgcctgtaatcccagcactttgggacacagagtcaggtggatcacttgaggtcaggagttcgagaccagcctggtcaacatggtgaaaccccatctctactaaaaatacagaaattagctgggcacggtggcatatgcctgtagtcccagctacaggaggctgtggaagaattgcttgcgcccgggaggaggaggttgcagtgagcccagatcgtgccactgcactccagcctgggggacatagcaagactccatctcaaaaaaatagatggaatgacagcaccacagggctacaatcagcgaaacatagactgtgggaaaatatataagataaacaacccaatttcttcaaaagaaattttgtaatgaatgaaaaaggaaagatggaaggagaacctgtagtttagagactcaagagatatatctacaatcataatgtataagccaggcacggtggctcacgcctgtaatcccagcactttgggaggccgaggcagacagatgacttgcggtcaggaaattccagaccagccagggcaacatagtgaaaccccatctctaccagaagtataaaaattggccgggtgtggtggtgcacgcctgtagtcctaaggcaggaggctaaggcaggagaacagcttgaacctgggaggcagaggttgcagtgagccaagatcacgtaactgcactccggcctgggtgacagagtgaagaccctgtctcaaaaaaaaaaaaaaaaaaaaatggtttggacacagatcagagaaatttgaatattgactatatattttatgatattaaagaatcattgttagctgggcacggtggctcacacctgtaatcccagcactttgggaggccgaggctggtggatcacgaggtcaggagttcaagacctgcctggccaagatggtgaaatcccatctctactaaaaatacaaaaaaaattagccaggcgtggtggcgagcacctgtaattccagctactcgggaagttgaggcagagaattgcttgaacccaggaggcagaggttgtagcgagccgagatcatgccactgcactccagcctgggcgacagagtaagactccatctaaaagaaaaaaaaaaaaaagaaatcattgttaatgcatttacgtgtgatgacaatattgtggtcatgttttaaaaataagtcctggccgggcgcggtggctcacgcctgtaatcccagcaatttgggaggccaaggcgggcggatcatgaggtcaagagatcgagaccttcctggctaacatggtgaaaaccccaccttgcaataggccgagatttcaccactgcactccagcctgggtgacagagcgagagttcatctcaaaaaaaaaagaaaaaaaaaaaaagccttactggccgggcgcagtgactcaagcctgtaatccaagcagtttgggaggccgaggcaagcctcaggccagacctgaggtcaggagtttgagaccagcctggccaacatggtgaaaccccatctctactaaaaatacaaaattagctgggcatcgtggcctgtgcctgtaatcccagctacctgggaggctgaggcaaggcaggaggtggaagttgcagtcagcgagatcatgaacactgcactccatcctgggcaaaaagagcgaaattccatctcaataaataaataaataaataaataagtcttttccttttagacatccacactgaaatatttacaggtaaaatgacatgatatctggactttttagtaatgtggagatgagtgagtggcagtaatcttttttcatgactataaggtgatgttaatttttgaagcattctcctcaaaagcaagattaaaaaaaaaaattttgtcgaagcagagtgataggtgcctgggagtttgttgtaccatcctgtctgcttaagtatctgtttagaattttccataataaataatattgattaataaataaaaattgtcgaccgggcgcggtggctcacgcctgtaatcccagcactttgggaggctgaggcgggcgaatcacgaggtcatgaatcgagaccatcctggctaacacggtgaaaccctgtctctactaaaaatacaaaaaaatagctgggcgtggtggcaggcacctgtagtcccagctacttgggaggctgaggcaggagaatggcgtgaacccggaaggcagagcttgcagtgagctgagatcacgccactgcactccagcctgggtgacagagcgagactcgtctctaaataaataaataaataaaaattgttttttaaacagaggaatatttttccctttgagaattctttataatacctatttgttttctcgggttatgacagatttggaacattgctaccaataaactgacgttcttgaactcctttaagatgaagatgtctgttatccttggtatcatccatatgctgtttggagtcagcctgagtctgttcaaccatatgtgagttgttccatttctgtcataagaatgtgcatagtttagagaatgcttttgtgtaaagaaatcatgacatctttggggagggattaataactcagaacctcattctacattatagaagtgcttttctaaaaatttaatggtgtggccaggcgcggtggatcatgcctgtaatcccagtactttgggaggccaaggccggtggatcacctgaggtcaggagttcgaaaccagcctggccaacacgatgaaaccccgtctctactaaaaatacaaaaatcagccaggtgtagtggcacgcgcctatattcccagctattcgggaggctgaggcaggagaattgcttgaacctgggaggcagaggtcgcagtgagacaagatggcaccactgcactccagcctgagcgacagagtgagactctgcctcaaaaaaaataaataaataaataaatttcatggtctggccgggtgcagtggcttacacttgtaatccagcactttgggaagatgaggcgggcagatcacttgaggtcaggagttcaagaccagcctggcccacatggtgaaactccgtctctactaaaaatacaaaaaattagccgggtgtggtggcgtgcacctgtaatcccagctactctggtggctgaggcaggagaattgcttgaacccaggaggcagaggttgcagtaaaccaagataacaccactgcactccagtcggggtgacagagcaagactccatctcaaaaaaaaaaaaaatgttgatggtcttaaattagacttaatattagtcctttaacaatttactgttccagtaaagatccttgaaaaaaacttgagcaattttcatcaaaataagtgaggtctctttttttccttgatgtgcaactcacataaaattattagctgtggactgggtgtgggggctcacacctgtaatgccagcactttgggaggccaaggcaggcggatcacttgagcccaagagttcaagacaagcctgggtaacacggcaaaagaccccatctctacaaaaaaaaaaaaaaaaaaaagttatgaactgtggtctcaaaatgtactagatttttccattctctttctcatggagagaatggtggggatggtattggagccgttcaaggttcaaaagtttaaggcctggcacaatggctcacatctgtcatcctgcactttgggaggccaaggcgggcagatcacctgatgtcaggagttcaagaccagtctgggcaacatggcaaaaccccatctctacaaaaaaatgtaaaaattagctgggtgtggtggcgcatgcctgtagtcccagctactcgagaggctgaggtaagaggattgcctaagcccagggaggttaagactgcggtgagccaatattgcaccactgtactccaggctgggtagcagagtgagaccctgtctcaaaaaagaaaaagcaacagcaaaacaaaaccaaggttcaaaagtttgaccgtgatagttaatcctgcattgtctctgttgtctccagcttctggttgctgctgcttaaagtgataaagacagaattgagggggtattaagtagaaaaatctagtgaatactccattcagtgtaggagtggccctaggcccatttacccttaacatttttttctctctcctttttagctatttcaagaagcccctgaatatctactttggatttattcctgaaataatcttcatgacctctttgtttggctatttggttatccttattttttacaagtggacggcctatgatgctcatacctctgagaatgcaccaagccttctgatccatttcataaacatgttcctcttttcctacccagagtctggttattcaatgttgtattctggacaggtacgtcagcccagaggcagactgtctgagatgattatacttgatcaggaagccagatgtttctctgaccctaaaaaatttataactgcccttctatgggacaattctagggctttgccacaaaatgtgataattattttgagaaattggatagtgttattcatagattagtaagaaagtactgttgggggaaatttgtgccatatttggaaactgcgtatgtgatcggtagacttttatatgatgtaccttgtccttcttcttactctgcagaaaggaattcagtgtttcctggtagtggttgcactactgtgtgtaccttggatgctgctgtttaaaccattggtccttcgccgtcagtatttgaggagaaagcatttggtaggtgtatttctattgctaaaagttactagacttttgttttgttcaagatcaaggcaattccccagtggatataattaattgtgcacaaatctatatattctttttctttttctttttctttttttgagacggagtctcgctctgtcccccaggctggggtgcagtggtacgatcttggctcactgcaacctccacctcccaggttcaagcaattcttttgcctcagcctcctgtgtcactgggattataggtgtacgccaccacacctggctaattcttgtatttttagtagagacggggtttcaccatgttagccaggctggtttcgaactcctaacctcatgatccgtccaccttggcctcccaaagtgctgggattacaagcgtgagccaccatgcccggccacaaatctgtatactattaaaacgcatttgtggccgggcgcagtgcctcactgctgtaatcccagcactttagcactttgggaggccgaggtgggtggatcacttgaggtcaggagtttgagaccagcctggccaacatggtgaaaccccatctttactaaaaatacaaaaattagccaagcgtgttggcgcgtgcctgtagtcccagctacttgggaggctgaggtggaaggatcgcttgaatctgagaggcggaggttgcagtcagccaagattgtgccactgtactccagcatggggacagagtgagactctgtctcaaaaacaaaaaaccaaacaaacaaaacgcatttgtgttatgtcccagcacgagcactgggcctgccaagtcagagaaacatgtctgctgctcaagatatctggattcagctttgagtagctagaggagagaaaagtcacaaatttttacctttcctggtcatgcttttgctcacgctgcgctcaggaaaatgtaggcctatgcctgtctagatgtagcatcagccaaagccaagcaaagctgcaagagctgcagatgggtgaactcactcatgcggtttgcctgggcaaccacaggactgacattgagacattttcctttcaaatgagactgtgataactttcactgaccaaaacatctgggaaaaaggtttggtttaaagcacgttgattttttttctttttaaaaagcagcatatgtatatacgtttacttaatgtctgtgtgtatatgaattctgcgcgcgcacacacacacacacacacagagttaaatttgcgagatgttcagtatcatgcataatttctgggtatccaatagcacttactttacactgcctgggaaaacccaaacgatcttgttgcatgactcttaaacggctgttagatgatgactcccgtggagagcagctgagttacaagaccctccttctcccttttctgaccatcttcatccttccatgtaccctccatttgtctccccacttcactccctccctcttttgttttctttccccttcttcttttcttccattcactatcaggaagggcaacctgtggaggccccagtcagcccaaacccgagccaacagggactagaggcagcagcggctgcaacagtgagtgaattaaaaccaacaaaccatcacatttcatttaaagaggtggcaaacagtgcagcagaattctttttaattaaattgagagcatgggacatgtgtacttttgggaaatatgtccttgttactcactgagatgatgacagaagttccacctcttaagaatagattctggcatcatctttagcattggtctactaagtttctattcaaaaatgtaagtacaggcatgtccatggcaacaaagtggcttgttgtaccctcactgagtcccatcatcttaatccaagatgacagctcttggactcacccactttcatgtctgtattttgtgaccatgtattggatgatttttcagcatggaagcgagaatatctctgtgattcttgaattgatttccctgcactttagagttctactttagagtgatgcttggacatttgatcttttttagtagtaacttaccttctttttgaaagtgaaagtttatacatgtttagttttttgtgagaaactcagaagacctcacatgtcctcagctgttccagtgagacctctgctctccgatgtgtcgtgtgtactgtcatctggtgtcataaccaaagtgatctgtcttgatccttccctcttctgatactaattcaagattcagtaacagcactttgaatatttgtccttaaaaacatcttttaaacaaaatcttacaatgcacaaatatattagcctaatatattctaagttatgaatgaatctataagattgtaaaagtctcaccagtagtgattacgcattacttctatgtgctcgaagcatatacttctttaaataaaatgaaagatttagatggataaccatttccttcattaagtgtttctgatgattttaaacttggaaaatttcttatggtcatccttctggaactagtctaagtcatccttctggaactagtctaaaagggctgacattttgagtcagaaaaaattttaatcttgctgcttaaaatacattttcaagtagggacttccctgtgagacatttaacaaacctttagaacacatactacctattgtcaatgtccttaacacatactcttttttctgctagtcttagcatatataagatgtgcttctgacaagatcttaatgcatttaagtcttgcgacttcttctgtgataaattctaagttaaaagttccccgtttggaaacctgcacattcatagggtcttcttaccccactggttctttagccaaacatctgttcctggagagcagcctgaaggcatcaggatgatcagtctacaagaaagtctctggatttttgaccccagagggctgaggatatgaacagtgatctggttttgttctgttctttgtccccttggttgtctgtgagtgatatatcacagtttaatttttcttttcttttttctgctgacatgtgtctctcatcccccttcctgtaactctcattcctgtgttctgaagagatcattattagtgtctggctgggagatttaacctgtctgctcctcagtttatctgctagttggagaaagcttcagaaatggccttctactttgggagccttgaaccttgaagccttcctcctatatcttataacccagccgaggttatgcaggagtcccctcctgtgcccttcgttgcattttcagtccaccttctgagggttgccaggtggaatatgtgcatgacctggaggtgtccaggctctggtggcccacaagtctgactgcacatcacagtcacctggtagactttgaatttgtttcttagggtattaaaacaaataagtggaagaagaaataaaagtggcccataatttcatggtcctgacaatcccctactgacattaaaaaaataaagcaataggtgcacttggctagagaatgcatatagtgctaactaagaagaaaaccacctgcccccactacagtcctcctcttcagggggcattgttaacaggtgggggccttgcctctgacagatatctgcctgtcttctattgataggtgtgtgtgtgctctatgcatctagaaaaagacacatgaggaattgtgttttaaactgtggcactgttctgcctctcgatctattacgttttttaaaagttagtgtatcttgaagattgtttcatagtgataatcacttttttttttttttttctgagatgaagtcttgatctgtcacccagctgtagtgcagtggcacgatctcagctcactacaacctccacctcccaggttcaagcaattctcctgcctcagcctcatgagtagctaggattatgggcatgcaccactacgcctggctaatttttgttttgttttgtttttgagatagagtcttgccctgtcgcccaggctagagtgcagtggcacgatcttggctcactacaacctccgcctccccagttcaagcaattctcctgcctcagcttcctgagtagctgggattacaggcacccaccacctcccccggctaatttttgtatttttagtagagacagggtctcaccatgttggccaggctggtcttgaactcctgacctcgtgatccacctgcctcaggctcccaaagtgctgggattacaggtgtgagccactgtgcctggactaatttttggatttttaggagagacggggtttcaccatgttggccgggctggtctcgaactcctgaccttgtgatctgcccgctgtggcctcccaaagtgctgggattacaggtgtgagccactgtgcccagctgactatcactcttttttatggttgcctagcattccatagaatattccactggacatgccaaagtcattatctctttgatggatgtgttggttgttcccaattctttgctatcacaaacagcaattcagggaacatcctttttcatatgtctttttttttttttttcttgagacagagtctcgctgtgttgcccaagatggagtgcagtggtatgatctcagctcactgcaaccatcacctcccgggtttcagcagttgtcctgcttcagcctccagagtagctgggattacaggcgcccacctctacgcccaactaatttttgtatttttagtagagacggggtttcgccatgttggccaggctgatcacgaacttttgacctcaggtgatctgcctgactcggccttccaaaatgctaggattacaggcatgagccaccgcgcccagccccttatccatataccttgccaaagttttgcaagcctagatgttccagcagtgggattgctgaatctcaaagggttcatgcatttaaaattttgataaacccttcacaatgattatacaatttgtacttgggaatatatttttaaaatacagatttattgggccccaccccagaactactaaatttacaatttctgggagtagtatttgagaatttctatttaaaatgcagcttttggggtaattctaatgcaactagttctctgaccagcatgttaaggaccactgctagagtaggagggaggatttgtgcaaataattagatctgaggtgggcattaaactgtgatgagagctgtggcaaaaaatggcacaccaggaggtggagctgaggatgaggagcgcagggcagctgcgcaggcctcctgcacgctactcatgctgctgcccgaaggccaggttgcaggagagctgcccttgagctcttgccttgtttggccccctggacagaaaccatatgaagtgattctgggggctgctgtttaaattccttttcacgctgtggcaggttagcactaattgggatctgtgagacttaactcatttctgcctggttttttttcccaaagagtcttttttgctttgggtttggaaaaactcaagttttttcaaatcaagttgactttaaaatctacttttggagaccctacaaaagactgtgtttgtgaactcagaagaagcaaatgccccatcagcgtctgcccacgtgcctgtggaagaattgttctaacattccagagctgtctgctgaagaaaaggagcccctactcatctttttaagctcagcattctctagccacaagtgaatgtacattaagcatttttttccttctctgaccttggaagctttttgttcctgggcagagacatggtacatttctggaagaagttgctggaattcttgggctcctgttaaaagcttatcagactagggtacaatcacaatgtcacttggccccccttcctcttagaaagtctaatcgttagggccagaaaagcttaggcccttgcagcctttacagatagagctgtacttgttgtgagaatctgttcatattaaggttttcattcaagcaggattctcaattagtgttgacccaggtgaggctggtgcctcttggcacagcagacagaactgcatatttcctctgaagcagggtaaggtggtaattgtaggttgggctggggctggggaggcggtggttggggtggaacagttgtttgattttacttagccgttcagtcagtgggttttgtttttgttgttagacatatgcttttctgaggtttgtgttactaaccatcgcccttcccacctcacagaatgtcatgttaaagcccaggcaaattctactctttctgttcatctgtgtagggaactctcaactttggtgggatcagggtgggcaacggaccgacagaggaggatgctgagattattcagcatgaccagctctccacccactcagaggacgcagacgaggtaagatcccgtggtgtgggctttctctccttccacctcgggtcagccctagtcttgtgtacctaagaggcctcactccagtcttctccttgaaaaataaaaatactaattaatattcagcctgccttctggacctcttagggcaccacagctttttccagtgggccctgccctaagctccagctgttgcccccagagcccgcagcagttttgctcctatcttgaattccagattttgcccgcagtgctctgcacgcaggtctccattactgactgctctctcacctgaggcagagcaggcctcagcatcccagctcttatgacctgaaacacaggtcactaagcacagcttcttcatccattgacccttccaaggatcgttccaattacattactgaccagctataatcactggtacttttgaagtcctacaccactgatgtgttcttgctgcagatattttgtttgagcttttttggtgtcatttgcctactttttacagggagagagagaattaggccaaactagacttttccttaagataccacctccaagcccactctccttgcctgaccccttgtagcacaaagcctctgaactgaactattaaatctcatctactcattatgttctttttaaagcaaataaaataggagttgaggactcaagttggacttttcagtctgtctgaccactttcactatatatgattttttaaaaaagaaatcacaagggttgtggatgcctttaaaaaatatgtatcttaatgctctaaattcctgctgatttcgctttgtgtatatgctgaggaggcctgcctccaacgtgctagcccatttaacatgaacagtcctccccaagaagcattcagtagccttgtgctcctaacttgtgaccttgtgtgtggcgtggctccccactaagtgtaaatttgtgttttcaagccttccgaggacgaagtggtaagatgaaagctggcgttgccttcgtgtttatccgggcttctctcttcccatccttgtgatcactctgctgaccctgccacaccctggggccatacacatgactcctgtgcctctgcatctcactggccatttcaaaccagttcgtgagcctgtgttctaaaaagctcatctccattaactgcatctcatgtcggtcacctctgtctttgtttcattgactttgctgatttaacacctctgagaatggctttgaaaggagctacaagtaatgtcttcactggcattcttgaagtgactcctcttgggggttaagtcccattggcctctgccttcctctcctgtgatgttgtggttgatctactcccagccaccgggagtagccgtttcctccctgctcctcctagtgcttgtgagcaaaccttacccttcctccctgtctgagccagcctcttcctgctgccctcctcagcttgatgatgcttcaacttagaagtggtggacccttctcggggtcagctctacctccatgtgacccaggtgagagggagacagctttcaaaaggaggctttgccttccagatgcatcccaaaggaaataatccatctgtgtgaaaggagttcatattatatcagccacatagagaataacggagactggaaagcaaattggctaactgttcaggccacatctcgagtagaaggccctctggctcagcagtaattcacttagcaacatacactctttaaactgggtttttaaaacaccttgctgcactgtttgcatcttcccccagcacttctctctaaaatgcctagacccacaaaccatacccttcccttcctgactctcggtcctctctaggagggcagtgggatgggaatgggaaagcctttgctgttctgtgtaaacacaggtagggcctgctcttcctgaagcctagagaggctcctttgctggcatcaaagagtgtctgtgttcctggactgctcatctatgcagtccctggctgagctacctggcagggatgggtggggcgtgctccatgttaatgaggagcccaaccctttccctggctcactacctccaacaacactgccttttaaatgttttcctagccgagcacccacattgtcagaatggtctgaccaactattgtgtaccagcgttctcgtttgtagccatgtcccaggaggttggacatccaacaagatagactctaattcagcctccccagtctctggccacccagctcactcagggattcagctacccttggctacccaagtagtctaaacattttatctttatcaggcacatatacagtctggttctctgtagccaaatttagatacccatgacatttatctaatgatttcaaaccaaacaggttcctaaaaaaacattcagcctacttctagaacttccccattttgcttggctgtgaaaatgtatttgtcccatgcaggcccttgctccagcccagtggaagcattagtacctcttcctagcgggaactcagtccagctacacaccagagccaggccagtggttgtctgggaaatcttcaaaggccgtgaccactcagcaagggtcagtggcacctctccccactgtctcctcaccaggtgcattcatcccatccatccatgcattcactcaccctccgtgttgtccagcactatgtatagtgctgcagaaacaagaagaatatagtgcttgccttcaaagacctcccaaagtggggagatagtctggatgacaggtgctgtaatagaagtgtgccccggatgctataggagcacagaaagagggcaactgatgaacactggggtgagagtggaagaggagaccctggaagactccctaaggaagttgtcttactctggtcaagcaggaggccctgtagagggagtggtgcagacccaccagcatatgcagcttcacaggggcaaaacacctgtaggtccatcacgtgttggggactagcaagtattcagcttggctggagcagaggcaggagtggggaactggggacaggtgagactagaggttggcagaaaccagccatagtagtttttgcctcatttggacaacaaggagccatccaagagagagcggtgaagctgatggtgacacagccatggcgcattgaaatacccccagtggctgtgttgtagggtatattgggttggggagggacaaggtcaggaggcatagactcgacatcatctgatgtgattcaggacagaatggcgagcctgaagtgaagtgtctgtaggataagttggaaaggaaggaaccaatatgagatattaaagaagtgaaagctataggtcccagtgccttaataaaggtaaggagtaagagaagattcgagattgactcccagactctccagtctgctggacatgggagatggaatagaagttgatctcggtgtggtcagaggagagcagttactgtgttgagcatggagagcctgtcgttccccaggagaaggagtacagctggctggaaataggcaaggcagagatggagagatccaccttggagtcactcctaggggcgacccttgaagccctgagtagcaatcccaccagaaagatgcaagggctgaagctgaaacttcagagagcatcggcatttaaggaagaaccttggctgggcgtggtggctcacgcctgtaatcccagcactttgggaggctgaggcgggcggattgcttgagcccaggagtttgagaccagctggccaacgtggtgaaaccccgtctctactaaaaatacataaattagctgggcggtagtggcatgtgcctgtaatcccagctactcgggaggctgagagaggagaatcacttgattctcctgggaggcagaggttgtggtgagctgagatcgtgccactgcactcctgtcttgaaaaaagaaaaaaaaaaggaagaacctcgatggagactaaaaagaactgtccagagaggtaggaggaaaaccaagggatggcaggtatttcaaaaaggaggaagaggctatggtgacagacactgcaggagcatggacaagggcacagaacatctgttagctttaacagctgggccaggcgcgggggctcacgcctgtaatccccagcactttgggaggccaaggtgggtggatcacctgaagtcaggagtttgagaccagcctggccaacatggtgaaatcccatctttactaaaaaattagccgggtgtggtggtgcgtgcctgtaatcccagctactgaggaggctgaggcaggagaattgcttgaacccgggaggcagaggttgcagtgagctgagatcgcaccactgcactctagcctgggtgacaagtgaaactccgtctcaaaaaaaaaagtaacaactgggaggttagggtgaccttactaagtagaggcattttgtggaggagtgaaggtggaagccagggtgcagtagggtgaggactggctgggcagagaggaaactgaggcagaagatgtggacagggactctgcagcgattcatggttggtcatggccgattgatacgggcgtgtgctgagtggcagactcataagtgctgagctggatttctcacccagtccttgcttctcctgagaacacctgcaggaagctgggaatgaaggagagaaggcaagggtaaggcctggaagcgaggcttctctcctgtcctgcagtttattcggtgggagaaacttgaggtagaataaaaacactgaagggattggctgtaagggagcccagtggtcactgccctcccagcccataggagtagagatcagcactcctgggagccatggacttcttcctctcaatgcgggccctggggcggcagccagcagtggtaggaaagagctcttaaccacggtgttgggatttagggaactcagggaactaggattaccctagttttcagggtaagtaaggaagcttgaagagcctgttccggaagaaaagcccagaaataggctaggtgtcgacagaggtgagggagaagcagacgttcgcccagagatggcatggtggagccagccccctccacgctggctgcacccctgtggcctgggctgttgtggctttaccagccaagccactttctcccatccccatgttctcagtgatttcccaaggcatttctggtgtcctttgggagtggaatcacgtgggttttgaaaggaactgcggtgaaaaatagaccctgacctgagggcaggggccgatggggaggccactgagccctcaggagtgtctgaaagctcagaagattctggtctgggctctgcggggggaagccccataagggagcgcctcctggtctttggtcagcttgacagagaggcccagggaaagtacctggggcttccagaatataccaaattcagaagcccacattcacccctgactgtgcttggagcaaacctgaaagttcactcccaagagcttgttccagcccattcctttattctggaaataattcttggtattgaaaggaaaactgggacaaagggagcttgaggaaaacgaaaacaaacaagaaactggagatatgctatttagtcttaacccaaacagatatgctgtttggccttaacccatgtggaaatttgtaaactttgtcaggatttccctgtgcatggtggtgaaatcatgtagggaaaaaaaaattcaccgtgtaatctctttagaagtcacaaaagaaaaagaaggttatcttgctcccaaaaggctgtaaaaagaataagtaaagtggccatagaggcctagtcttctcaggacagtgtccgggttgagagtctgtctcctgaagcgcactctggggaaaatcccttcctgccctcctgcaggtccttagggtcccagacccagacagtcactttctcaacagagtgccgtcaactcagcacacactcctctcttgagcacagagccccagagggagaagaacaaatgtgttgaaaagaatcttattaagatgtagttaattaaaatgtaatgtattgaggggaatggaggtgtcccaggtgagggctaagtcaggcaggatttttggggaaggcattgccgaaatcaccacctgagctcaacactgggtgcttctggcccctccagagttgaggtgccatccatgggaagtgcagtcccctgccctggcccaggttcaaagcgccaagtagccacaactcagaatgcctgcacgttcccctcctagccttatatcttctctctggtttcctcccacgacagtttgactttggggacaccatggtccaccaggccatccacaccatcgagtactgcctgggctgcatctccaacactgcctcctacttgcggctctgggccctcagcctcgctcatgcgcgtgagtacctctctccgggctccggaactctagtttccccctctgtgggcgcactgtcagttggggggcttaagtcaaatggaaattacatgaaggttctggaattattcaggttcctgaacccaaggagaatgagtacagacaggaggctcagcacttgtgccaggttagctctgcatggtggtcccactaaggcagtgggaagccaggatccagggaaccctagagcagggggatggcagagcaaaattcatggcctacagctgcctcttgccaaactgcactggattttgtgtctcccattccccagagctgtctgaggtgctttggaccatggtgatccacatcggcctgagcgtgaagagcttggcgggaggtttggtgctgttcttcttcttcactgcctttgccaccctgaccgtggccatcctcctgatcatggagggcctctcggcctttctccacgcactgcgcttacactggtgaggggcagtggggcagggcgggcatgggggtggatgtgtccttagctgcggtgagagggcagcttttctcccacacacagccctgcagctctgtgcaggaaagatgagctggccctgcactagcttcacctcaggacaccccagcaccggcattgccacagagtttcggaaaatggtcacagaaaagcacagctcagccttccctaggctctagggagatgtccctggtgagtggtgtcaggtcccgctccctgcctttagctgtccccagtgctcctgattttggcttaaaggggctgctggggtcttagggtttctggttttctctctgatgtgtaactcttctgtcttcagaacagtggaagcagctctggaatgtatgttaagtgcaggaaaggctagaacacgctgcaccccagctttatcctctttgttctgtcattgtgccaggggtctttgagttggacccctggcagctccattgtggaccggagggattcctggctctatagggtggaggtcggtacactcacgcagcttcttcacatgggcaggtttggggtggttctgtttgttttctttaatgaagcttgtgactcttaatggctgtgtgtggagagagcatgagttcagcctctgggactgggagagcgggggtgtggtctgggctgtgaccacctcaaaccagcgttgccagatgtagcacataaaagtacagtttggctgggcacggtggctcatgcctgtaatcctagcactttgggaggctaaggcaggtgaatcacctgaggtcaggaattcgagaccagcctggccaacatggtaaaaccccgtctctactaaatatacaaaaattagccaggtgtggtggcacgtgcctgtaatcccagctactcaggaggctgaggcaggaaagaatctcttaaacccaggaggcaggggttgcagtgagctgagattgtgccactgcactccagcctgggcaacagagcgagactctgtctcaaaaaaaaaaaaaaaaaaataggggaggggttgggggccaggcacggtggttcactcctgtaatcccagcactttgggaggccgaggcgggtggatcacctgaggtggggagttcgagaccagcctgaccaacatggagaaacgctgtctctactaaaaatacaaaaacattagccgggcatggtggtgcatgcctggaatctcagctacttgggaggctgaggcaggagaatcgcttgaacccaggaagtggaggttgcattgagccaagatcgcgccattgtactccagcctgggcaacaagagtgaaactcggtctcaaaaaataaaaatacagggtgtatttcacataaacaacaaataatttttttagtatgagtatttcccaaatgtgcatgggatatgcttatactaaaaactggggcagtctgtattttctgtggctgttccacctcagactccacttctttgggtctctattttctcctttatgttgtgattctctttttgggggtctcaaaaccccaatgtctctggaagttctggcccctctccccagaggagcactcacacacttctcctgttttacaagcataggggtctgactcactggtgtgccttagaggcccctggatgggatgctctgtggtgttcatgatctcaaggccagaagaggactatgaatgtctctcttcgttctcaaaacctgaagaaaatccagcatctgaacctgagaaactcattccccactcccctttatctttgattattctcatggctgggtgacccctgagcctcctcaaagattcagctgtgggtttttctgaatgatgggcggagagtgaggcatggaagggcaagacgtggctagggtgcactcttcttcaaaagccctgctgcgtcagtagacctggcttcctctggcctggctctctccctcctggcctccctcctccccacccagctcatctggctggcctccctgttctaagcttatcagccgacccccgcaagcacacttcctcagccctcctcagtgcacgagaacctctgaggactcactttttcttgccccttggcctcctttcttttcttttcactcctgtctcttgagccctgggtttgagggaacagtgaccacctcaccttgattccagcccacgtgggtagccggtcatctccctgggcagggcgggagcaaggcactgttgcagagcaaggccgcctgggcttgagcctcattttgttgccagaagattgcttcctcctcaggctcacctgtggcctccccgtgtcttcccaggtccccctgaactgaagtgatgagtggcaggacagcaggctccggaattgggcgacctgggttggaattccagcactgtcacaccaggcagggaacctgagcagaacattcactgccaagattactgtgagcaagtaggaagtaatgcacacaccaagtgctgccacagcaaaagcaggtgctctaggatgggtagtggctgctctgcttaaaagtgggatgcccttactgggtgcgatggctcacacctataatcccagcattctgggaggctgaggcaggcagatcacctgaggtcaggagttcgagaccagcctggacaacatggtgaaaccccatctctactaaaaatgcaaacattagctgggcgtgatggtgggcgcctgtaatcccagctactcgggaggctgaggcaagagaatcgcttgaacccaggagatggaggttgcagtgagccaagatcgcgccactgcactgcaacctgggcgacagaccgagactccgtctcaaaacaacaacaacaacaacaacaacaaaaaaacctgggatgccctagagagagggtgtctgcctggggtcccccataaaaagactgcttttagcctgtctagagtgagagaagaccccagaggaggcagaggataccatcagaatgccctcaggtgctgtttgcaaggaacagcctccccatatatgtcgtatttattttggcaataggagtattgggtaggagaggaaaaaacagtgcaaacctcctttgtgcaacttccagaatctcgtctttggagggctgttcccgtgacacgagtggggcgcctcccccaccactaaaacagaagtgaatgaaattggtgcttgtgcgccccctcctggcaaaatgcggctgtgcgtccaggatgcctggatcttccctgtggcccaggactgcaggaggcgttctgagctgtggccctcttaccaggggtggagcctctggggctgctgaaccagctgtagggatggtgctgctgttcttcctggcatccatcctaggcatcttcatacctcccactttatccctgctgtttcctgattcaagggctgccccattatacaagttctggtctcctcagtggggacaataagaaaaacatttgattcgataacatataaaccactagtgtgagattcatgcagcatcataggaaggggggtgatgtgtttgaaaacagtgagcaggctaatgtattaatctgctaattctgtctcctgagttttctctcttttcctccctcctgccacatgaagtgtgcttggcttcttacctaccataattagacatcttttcttcctcagagaaggcatgagacagggatttgattgtagttatcactgtaaacatcaaactgatttttatgcagaactattgccccagggcataccttccaaggaacctggtctctccttacctagcgaattccacatacacatagatgtacacctacctgtacactcacagattgggtggtgattaaagggacagaatcggggaccagcttcttgttaggaatgcagtgttgccacggcatgacagcatggagcagttgagggaatggctgcccaggagaactcagaactcttgaaatgtagttccaggctgccatcattgccctgatattcaggccgtcagacagatgtgtgttgtaggccctgaacggcacagagagtggcagaacaggctacataaacagctcagcccagaattgtctttccagactgcctgccctcagtcacaacccccaccagggaagggaagcggccccaagactccttcctccttcacccactcgaggaaacagagttcctgttacgtggcatgaatgatgtcttttggccccagttaatccctctgagtcaccaggtggcctttgccaagtgctggagctggaagagatgatagagacactcatctggcgtcctgaggctctcctcacagctgttgaattctagaggtgcatttcagtgtcttggggcatggcaagactttggaggctccctgagcagagcagtggagatgcccaaaaagaaggaagaacctaggatggcagatggggccccccttgccctggggaacttcatgtttgtactttctcaggaagcacacatttccccagttcagcgggagagagtggggagactagcagggaaattgctttccagctttgtgctgggtggttggggtgagggtggccacggaaggaggtgaaatcaggctgacctcaagatagacccaagatgtcccagttctggccgctctaagtctctaaagcagcagctggtgggaggggcagtattgggcagtatgtcagggaggccacctgtctgctcacacagtacaattgatgtgcccctcccaggcatatatccctcttcctccttgctgggcccccatgggtagataaggtgactggaggggtgccaagaaaagggcggtgcccccacaggcatctgaaaacaaagctgctgctccatttgcccagtttgaagattagaatggttttgtgattagccaggagggggtgggggtcagagttctggacacctcactggagtcgggggtcagcataccctaccaaggctgacattcactcctaggtaatggcctgggaccctcaggtgacttgtccactctctggctatgtattgttgaatgaaaaggggacatgtaaatctcgtttcagctgttctgaaataacccttgccacatgggaacacagtctattcaacatgaagaattcaaacctaacacaagtgggtgagaagcaggaacccactgctaggccccaccgcgttccctcagaggtggtctcagtagctggaacttggagaagtagttttggtggggtgttgggacgtgggtgaatccaggtcctggtttggaattgctctggtgggaaccgtcagctaacgtcagttggaagctctgtgtcctccccctcctgagtcctgtttttcctggaggaccttggcccacccctgtggaatgtggggatgtggggaagaaagctgactgcttttactcccactcagaaaattcggttgcgctcttcttcaagggggtgctcctcagcctgcaccccagtgaaggggcctctgaggaactcccagtgccactggcaaacagtctgtaacctttgggccccagccacctcccagcccctgttctcttaattcctgccttcttggcttggagggaggaatctccatttgtaaaagctgagttagggaactagagggttcctgaagctttaaagcgcctcaaagccctcaccctgcacgtgacctgtcacctggagcctgccccagcccccacgcctgcctgttcttataggggctccggtgcctccagggtcacacagcaccatgtggaaactattcctcagggcagctctccttggcctttttatcccctgaatcatgcatttttctgcccttatttggtgtggtttggttgctgggcagctgtccagggtgagtttgcaggaggaagcacagccaagcagcctcgctctgcttatgggacagtcttcctcccaccctccctgagagtgaaagggccccacagagaccatcaggcatggatgctgaactgctgggaagggagctcaggctttttctttttagtccccaagagaagaattctttctcagatgtttttgtggttggagaatatttttgccattgctttgagaagacttcccctcctaactccccctctttccttggaatttccttccttaaatggaaagccttcaacattcactccaagctcgcccttttgctcccccaaggaaaaataacaagcaaacagaggtgcttgcccagtgtctctggaggggcttcccttagaggtgggctgtgtgatcccctgccaggagggggcgatgggggccacttgttcattaacgatgttaggctcaaggtaactgaactttttttgcacatgcctctctgcagagagttgtgcataaacacactgctcggcaggacagagcaagattgggaactgagggcaaatcccttcctccgtgcgtcgaactcttgatcccaggccttaaaagtgggatctctgcactctgggctttctctagcttccccagggaagggaggctcggggtgaggtgggcacggggcatctttcctgcccaactgtgaagtcctaaaaagcttcacaaagtttctattgaatgacagctttcttcttctctttctccagggttgagttccagaataaattctacagcgggaccggtttcaagttcttacccttctccttcgagcatattcgggaagggaagtttgaagagtgagtccctgtgagggccgtgtgccccatgctaccctccccgcctccctccacagtgatcagctgtgcctctctgcctgttggttgtgatctgtgggcaccagctcattcgtgtcaccctgtctgtgagtcatttagatagaatagtcctccttgggtctcccaccacccctagctttgtgtgtagtgtagtgattttctggctgtcactcatactcactgggcaccagccttgccctcttagcctccatccatccagacagcccttcccacctcctggtggtgagccagtctgcattcccacgccatcccaaagccctttcatcttccccgtgcattgtagatggaaggagcacccatgccattcacatctagactttgagttccctgcatctgccaccgtagtttctagcaggagtagtggggggagtaatacagattcttccctagaaggggacactggtaacatgtcccactcttggattagcaggggtgggtccaggaagatgatatttgcgtcttttgcccacccccctggcattcagctggacccaactaggccatcatgagtggcttctccctgtcatccccaggggtcataggatatctacaccgcctttctgaccccaccctgcactcccatcctttcctctctccccgttcatgccctgcactacatagcacagccgggatgcttggaacagaggccttggctgctccgcagtgcacagggcttccctctctcggggttggcttcttcccaggccttgcatgggccctgcccacaagcacaccctcaggccgagggtgcagactgatgctcttccctgatggagaccctgagatcttccccacccccaatcatgatgtcttcagtgtgggactggggtcctcttggttctgcctgcagcctgcctggctccgcccctagtgccccctcctcaccacactggccccaggtctcaggaggggtgtcctgggcagggaaggtcagtgtcactgatggtttgctgtttggaagccattggcagggctgccgtgcatgtggctgtgagggctgcacagtcctgccaaggggcttcctccttgtcaccccgaaccttgtaatcgtgtgctggcgtggcagccctggctaagttaatccccaccgctttcagtggtagaaagaattccctgagtgggccaggctggtgccctcctcctaccctggcttttctgagtgagctgcctggagccctcatcccctctcccaggctgggctggccctgggcggggccactgtgtgctggcccactgtgacctgacccgaccttgtgcagcccccctgccctggtgtcctgggttttcgtgatgatctttgctctgtttccagtggggtttgaagcagagttcagggaaccctgcccaaggtcctcctgttcagacattcctatgttgaataaagtatgtttgacttccccggagaagctgcctgtcactgtgcccacagcccctgcgtcgctccaggctcagccatcttgagcccctgtggacccctgaccttcgcctccctcctccagcattgctgcttttccttctatcaaaggccacagcttcagtaggcctggctgggcagttggtttgggaaattctcaccttgtcccaagtttcccaggcgccttcccactcacaggatccaagtcagctctgcagacactacctgtgggaagaggggactgggcagcccatcttcgtctcccgtttactcattgcacatccagacagcatgggggcagaggggcactgggtatctccccacgcgcctctccctcttctccaagtgtgccctccagggcccagtggcctggctatgttgagccctgataccccggccttagtgtaagtggaggctccacacaggttcctcagggcagctggggaatgtgaggtgctgggattggcaggcggcagggtggagagcaggcagaccgtccagggtggcaggctgggcaggaggccccctccccactgcctagtgaggcactgcattctcggtaccctccctcttcactcctccctccaggggcctccagggcaggggctgcccaggaatgtgacctgggccccagacaggtgaaggggccacaaccccctgttcattccatgttccagcctaacctaaagcccttcctcctccctaacagtgctacctgtccctggtgtcggccctgagaggcccaccccacccagctcctcaaagataaggtcccgagtggaaactctggtcattgaggtctcagcttctgctcagtgggaagggaaggcctcataagaatagatatttggaatcattggattcgaattgagagtccaggaataaatcctaacatttatggtcacttgatttttgataaaggggtcaagataattcaatgaggaaagatctctctttttcaacaaatgacactggtacaatggggtttccacatgcaaagaaacaaatttgggccactatccccaccatatgcaaaaattacctcaaagtggattccagacctaaaatgtaagtgaaaacgataaaactcttaggggaaaccataggagtacatcttcctaaccttgagttagccagtgatttctagatatgacactcaaagcacaagtgataaaaaataaaaaaaaacacatagataagttagccttcagcaaaattaaaagcttttgtgcttcgccgggcacggtggctcacacctgtaatcccagcactttgggaggccgaggcaggcggatcacctgaggtcaggagttcaagaccagcctggccaacatggagaaaccccgtctctactaaaaatacaaacaattagctgagtgtggtggcgcatgcctgtaatcccagcaacttgggaggctgaggcaggagaatcgcttgaacccgggaggcagaggttgcagtgaaccgaggtcgtgccactgtactccagcctgggcgacgagtgaaactccatctcaaaagaaaaaaaaagggtttgtgcttcaaagatcagaatctagaaactgaaaagacaaccctcatagaagaaaatatttgtagatcatatatctgataaaggacttgtatctaggatatataagtaactcttacacccaataataaaaacaactcagtttttttaaatgggcaaaggggttgaataggcatttctccaagtaagcaatatgaatggccaataaacccatgaaaagatgctcaacaccattagtcattacagaaatgcaaatgaaaaccacaatgagataccacatcacacccactaaaaaggcaataagaaaattacaagtgttgggccgggcgcggtggctcatgcctgtaatcctagcactttgggaggccgaggcgggtggatcacgaggtcaggagatcgagaccatcctggctaacacggtgaaaccccgtctctaccaaaaatacaaaaaattagccggccatggtggcgggtgcctatagtcccagctactcgggaggctgaggcaggagaatggcgtgaacctgggaggcggagcttgcagtgagccgagattgcgccactgcactccagcctgggcaacagagcaagactccatctcaaaaaaaatgagaaaattacaagtgttggcaaggagaaattggaacccaattcactgctggtgggaatgtaaaatggtgcagctgctttggaaagcagtctggcagttcctcaacatattaaacagaattggctgggcacagtggctcatgcctgtaatccgagcactttgggaagccgaggtgggtggatcatgaggtcaggagatcaaggccagcctggccaagatgatgaaactccgtctctactaaaaatacaaaaattagccaggcgcagtggcaggtgcctgtaatcccagctactcaggaggctgaggcgggagaatctcttgaacccgggcggcagaggttgcagtgagctgagatcgcaccactgcactccagcctggatgacagagtgagactctgtctcaaaaaaaaatattaaacagaattaacgtaagacccagcaattccactttcttatctaccccaagaaaaatgaaatcatacccacaaaaacttgcacagaaatgttcatggaagtattattcataatagccccaaaatggaaacagcccgatgtccaccagctgataaatggatccataaaaggtgggatgggcatgatgaatattattctacaattaacaagaatgaggtactgatgcatgctacaacatgaatggacctcaaaaaccagccacagaagaccaacaatttatgattccgtgtatctggaatgtctagaatagacaaacccatagacacagatttggtggataccaggagctggctgccagatggggctggggagagagttatgatggggagtgactcccaaggagtatggagtttctttttgaatgatgaaaatgtaaagttaggctgctgatggctgcacaattatgtgaatatactaaaacccattgaattgtacactttacattggtaaatttttttttgagatggagtcttgctctgttgcccaggctggagtacagtggcacaatcttggctcactgcaacctctgcctcccaagttcaaaggattctcccacctcagcctcctgagtagccaggattacaggcacgcaccaccacacctggctaatttttttttttcctgagatggagtttcactcttgttgcccaggctggagtgcaatggcacgatcttcactcactgcaacctctgcctcccgggttcaagcgattctcctgcctcagcctcctgagtagttgggattattggcatggggcaccacaccctaatttttgtatttttagtagagacggggtttggccatgttggccaggctggtctcgaactcctgacctcacgtgatctgcccgccttggccttccaaagtgctgggattacaggcgtgggccaccgcgcccagccttacattagtaaattttatggcatataatctgaataaagtgggagtggcctaggacttccttgggaagaaattcctcccatgtctctctgatgaactgggaggaagcagggccagtgagtccttggctagactgagttctcagaatctagtggccttgggctccttccagctaaagatgggctgaccaagactgagctgtggagtgtgcaggaagtcccagagccctgtggtagggggtggggaacaggatggctgcatccacttgttcctgggggtttttttctttgtttttgttttgttttgcttggttttgttttgtttgagacggagttttgctcttgttgcccaggctggagtccaacggtgcgaccttggctcactgcaacctctgccttccggggttcaagcgattctcttgcctcagcctcccaagttgctgggactacaggcgcctgccaccacgcctggctaatttcttgtatttttagtagagatgagatttcgccatgttggccaggctggtctgtaactcctgacctcaagtgatccacccaccttggcctcccaagtgctgggattacaggcgtgagccactgtgcctggccatttgcttctgttttttttttgttgttgtttgtctgttttttgttttttgtttttttgagacagagtctcgctctgacacccagtctggagtgcagtggcgcaatatcagctcactgcaagctccgcctcccgggttcacgccattctcctgcctcagcctcctgagtagctgggactacaggcgcccgccaccatgcctggctaattttttgtatttttagtagagacggggtttcaccgtgttagccaggatggtctcaatctcctgacctcgtgatccgcccgccttggcctcccaaagtgctgggattgcaggcatgagccaccgcgcccggctgctcctgtttttaagagatgtgcctttaccctgatccccctcttgtggaaccccaggaccccagacatctgtctgatgagtctgtgccctggtccaggaaatgcccctcatcttgaggtcctagaaccagtgtgggagagggtggccttggcatgcttggcctggggagtcccaagctttgtagagataggggacaagtctatcaccaccttcactggatgggactatacttctttctgccccaggaaccttgggtagagggggcattggacctcaaagccagctggcagcctcagcatttcagatcaaagtggcctgcctcttcaacgtctcagcctacccaaggcatgtcctaggtgtaggctgctctctggtggccagatagggaaggactcattcatcctttggcaaggtgggctgcgatctgagctgggctgtgtgataggcaggcaactggattagacgggcagagacaaagcaatcctggggtattctggagcacataagcagaggggtaggctagccaggagcaaaagatgagatgggctggagagcacgcagagagcccagccaacttgcttcacacacactactggaaaagtaatgagttgtgtcacaactcaggctgggcgcagtggctcatgcctgcaatactagcactttgggaggccaaggcgggtggatcacctgaggtcaggagttcaagaccagcctggcgaaaccccgtctctactaaaaatacaaaaattagccaggcaaaaccccgtctctactaaaaatacaaaaattagccagccaatgcatgacagtagtcccagctagtctggaggctgagacaggagatggcaccactgcactccagccatgggggacagagccagactccatctcaaaaaaaaaaaaaaaaaggcgatcaaacagtactaaaggccctattatcaaataaataaataaataaataaataaaggctttcactcacagtgtgactctccccctccctcccacaaccactgtttacagagccttaaaaaaaaagcaaacaaacagatgataatgtgttatcttgctctgtcactctgtggcctggcctgcagtgctgtggtgccatctggactcactgcagcctcgacctcccaggctcaagcgatcctcccctctcaacctccctagtagccgagaccacaggtgcatgccaccatgccgggctaatctttgtattttttgtagagaaggggttttgccatgttgcctaggctggtctcggactcctagattcaagtgatccgcctgcctcaacctcctaggatcaggggccaccgcaacgggctagacttttttttttttttaagtcagggtcttgctttgttgctgccgagaccagctgggtcagagagaccctaacccagcggcgctagaggaattaaagacacacatacagaaatatagaggtgtgaagtgggaaatcaggggtctcacagccttcagagctgagatccctgaacagagatttacccacatatttattaacagcaagccagtcattagcattgtttctacagatattaaattaactaaaagtatcctttgtgggaaacgaagagatgggcaattaaaggaataggttgggctagttaactgcagcaggagcatgtccttaaggcacagatcgttcatgctattgtttatggcttaagaatgcctttaagcagttttccaccctgggcaggccacgtgttccttgccctcattctggtaaactgacagccttccagcgtgggcgttatgttcatcatgaacatgtcacagtgctgcagagattttgtttatggccagttttggggccggtttatggccagattttgcggggcttgttcccaacagttgcctggcttggagtgcagtggtgtgatcatggctcactgcagcctcaaacccctgggctcaagccatcctcccacctcagcctactgaggagctagctgggaccacaaacacaggcctctgtgcccagatgatttttgtagagacagggtttttccatgttacccaggctggtctcaaactcctggactcaagtgttccacctgcctcagcctccctaagtgctgtgactacaggtgtgagccaccacatctagcacacctagtgcagtccttctagagactgggccactcccagccccggagcaaccttacttaagccctccccgatcagataggcagcctgacaagttgcatttcctggggaagagcagcaagaaccctgctctgggagtcaggagttcccgattctagcccagagctgctttccttactagttattgatcttgcccaactcacttcctgtctctggctctgtttcccaatctgtaaaattgttactggaaaggggtcccaatctagacccaaagaaaggtgaggagagcaaaaatcaccccccccaagacaaaaagttcttatctgagcaatttagataaggagcaatccgccaggcgcagtggctcacacctgtaatcccagcactttgggaggccgaggcgggtggatcacgaggttaggagatcgagaccatcctggctaacatggtgaaacctcgtctctactaaaaatacaaaaaattagctgggcgtggtggcggggcacctgtagtcccagctactcgggaggctgaggcaggagaatggcatgaacccgggaggcggagcttgcagtgagcagagatcgaaccactgcactccagcctgggtgatagagcaagactccgtctcaaaaaaaaaaaaaaaaaggagcaatccaaggagcaaagaccacctgttgaccatcaaacaggccatctggaggcgaaactccttgcctggggaatttagaagtaataaaggccaggcatggtgaatcacacacactttgtgagcactttgggagccaaggcaggtggatcacttgaggtcaacagttagagaccagcctggccaacatgatgaaacaccctccctgcaaaaattagccgggcatgatggtgcatgcctgtaatcccagctactcaggagactaagacaggagaattggttgaaccagcaggcagaggttgcagtgagctgagatcaggccactgcactccagcttgggcgacagagggagactctgtctcaaaagaaaaaacaaacaaaaaaaacttccctagtatttaaagtcggcatctgattccaagcctctttcaacttttataagtaactaaaatgtctatacattctttttaaaaaaaaaaaaaaattcaacaaacacttatttctcacacttctggaggctaggaagtccaagatcaaggtgcttatagattcagtgtctggtgggggctcacttcctgctttatgagctatgccttctcactgtggtttcacatggtagaaaggggtagggctttctctctggcctcccttacaaaggcaccaaccccattcctgagggctctgccctcacaacgtaaaatttctgtacattctatgccatgctgaagctcattttacaaccctaagctctcaccttaaggtccatacatgctcctaaggaaaatccaccacagcgcactcagtcctcccgtggaggcacctgctgcactctgctgcagtgttcttcctttctaataaactttccttttccaaacctatactgttgtcagtaagttctttcttttttgagacccctccccccaccccaagacatgccagtagtcccagctagttgggatgctgagacaggagatggcaccactgcactccagcctgggcaacagagcgagactcatctcaaaaaaaaaaaaaaaaggatcaaacagtactaaagaccctattataaaagtctttcactcacagtgtccctgaatctccccctccctcccacaaccactgtttacagagccttaaataaacagatgataatgtgttaccttgctcagtccctggcctggagtgctgtggtgccatctggactcactgcagccttgacctcccagactcaagcgagcctaccctctcaacctcctcagtagctgggaccacaggcacatgccatcatgctgggctaatctttgtattttttgtagagaaggaggggttttgccttgttgcccaggctggtcttggactcctagattcaagtgatctgcctgcctcaacctcttaggatcaggggccactgcaatgggctagacatttttttttttgagtcagggtcttactctgttgcctggcctggagtgcagtggtgtggtcatggctcactgcagcctcaaacccctgggttcaagccgtcctcctgtctcagcctcctgaggagctagctgggaccacaaacacaggccactgtgcccagatgatttttgtagagacagggtttctccatgttacccaggctggtctcgaactcctggacttaagcgctccacctgcctcggcctccctaagtgctgtgactacgggtgtgagccaccacatctagcacacctagtgcagtccttctggagagtgggccactcccagccccggagcagccttactcaagccctccctgatcagataggcagcctgacaagttgcactgcctggggaagagcagcaagaaccctgctctggaagttaagagttcccggttctagcccagagctgctttccttactagttattgatcttgccgaagtcatttcctgtctctggctctgtttcccaatctgtaaaattgttactggaaaggggtcccaatctagaccctaagaaaggtgagagagcgaacgggccccggagacaaaaagttcttatctgagcaatttagataaggagcaatctaaggagcaaagaccacatgttgaccatcaaacaggccatctggaggcaaaacttgtctggagaatttagaagtaatcccagcactttggaaggctgaggtagatggatcacttaaggtcaagagttcgagggagcggcagcggcggccaggcacggcgcgaggcgacgccacaggacagcggcggcagcaggaaatgcagcggcggccgcagcagcagcaaaacggatcggtggagaggcgccgccgccgccgggccgggcgtcgcgcgccgaggctcggggggagtcgtcgcagccgccgccaccgctaccgcagccgccgccgccgccgccgcccaggtgactgaggagagaggcacctcctcgctcccgccgccgccggacttcaatgcccagtccccagctcgccagcgtttttcgttggaatatacgttgcacatttatggcgattctgaatgtgagagcagatttctgccaggctgagcacagcgttttcgctgacaagtgagcttggaggttctatgtgccataattaacattgccttgaagacttctggacaccgagactggcctcagaaatagttggctatttatttatttatttatttatttatttatttatttatttatttattttgagacggcgtctcgctctgtcgcccaggctggagtgcagtggcgcgatctcagctcactgcaacctccgcttcctgggttcacgccattctcctgcctcagcctcctgagcagctgggaccacaggcgcccgccactacgcccggctaattttttgtatttttagtagagacggggtttcaccatgttagccaagatggtctcgatctcctgacctcgtgatccacccgccctggcctcccaaagtgctgggattacaggcgtgagccaccgcaccccggcagctttttttttttttttttttttttttttgagagagagtttccctctgtcgcccaggctagagtgcaatggcgcaatctcggctcactgcaagctctgcctcccgggttcaggccattctcctgcttcagcctcctgagcagctgggactacagacgcccgtcactgcgcccggctaattttttgtgtttttagtagagacggggtttcaccgtgttagccaggatggtctcgatttcctgacctcgtgatccgcccgcctcggcctcccaaagtgctgggattacaggcgtgagccaccgcgtccggccagctttttttttttaattgcaagcatatttctttgaatgactccagtaaaattaagcatcaagtaaacaagtggaaagtgacctacacttttaacttgtctcactagtgcctaaatgtagtaaaggctgcttcagttttgtatgtagttgggttttttggagtccgaaggtatccatctgcagaaattgaggcccaaattgaatttggattcaagtggattctaaatactttgcttatcttgaagagagaagcttcataaggaataaacaagttgaatagagaaaacactgattgataataggcattttcatggtctttttaatgttttctgttgttaaacatttcaagatttattgattttttttttcactttccccatcacactcacaggcacgctcacactttttatttgccgtaatgaaccgtctagcccctgtggagatctcctatgagaacatgtgttttctgataactcacaaccctaccaatgctactctcaacaagttcacagaggaacttaagaagtatggagtgacgacttcggtttgagtttgtgatgctacatatgataaagctccagttgaaaaagaaggaatccacgttctagattggccatttgatgatggagctccatcccctaatcagatagtagatgattggttaaacctgttaaacaccaaatttcgtgaagagccaggttgctgtgttgcagtgcattgcgttgtggaattgggaagggcacctgtgctggttgcacttgctttgattgaatgtggaatgaagtacgtagatgcagttcagtttataagacaaaaaagaaggggagtgttaaattccaaacagctgctttacttaagatgcgattacgcttcagagataccaatgggcattgctgtgttcagcagaaagaaatgtaaatgaaggctgacttgattgtggcatttagagggaactcctggtacctggaaatgtgaatctggactcttacctgtgtcatcaaagtagtgatggattcaatactcctcaaccactctcctaatgatcagaacaaaagcaaacaagaaatctctctataaaatgaataaaatgtttaagaaaaaaaaagagttcgagaccagcctggacaacatggtgaaatcccatccctacaaaggttaactgggcttggtggcacgtgcctgtaatcccagctactcaggagactgagacaggagaatggcttgaacctgggtggctgaggttcccgtgagctgagattaaaaaaaaaaatcatacttccctagtatctaaagttgatatctgattccaggcctctttcaactttttttgtttgtttgtttgtttttttgatatggagtctcgctctgtcatccaggctggaatgcaaatggcacgatcttggctcactgcaacttccacctccagcgttcaagcgattctcctgcctcagcttcccaagtagctgggactacaggcgtgtgccaccaagcctggctaactttttttcttttttttttttttgagagggagtcttgctctgtcccccaggctggagtgcagtggtgtgatcttggctcactgcaacctccgcctctccggttcacgccattctcctgccttagcctcccgagtagctgggagtacaggcgctcgccaacacgcccggctaattttttgtatttttagtagagatggagtttcaccgtgttagccaggagggtcttgatctcctgacctcgtatccgcccgtcttggcctcccaaagtgctgggattacaggcgtgagccaccgcgcccagcacctggctaacttttgtatttttagtacagacggggtttcactgtatgttggccaggctggtctcaaacccctgacttgaggtgatctgcaagcctcagcctcccagagtgctgggattacaggcgtaagccaccgctcctggcctaaggttggctatttttatggttatttcttgattatatgataaacaaggggtgggttagtaatgaatttttcagaaaaggggtggggatcccccccaactgaaggttcctccactgtttagaccatatagggtaacttctggacgttgccatggcatttgtaaactgcctggcgctgctaggagtgtctttagcatactaatgcattataattagcgtataatgagcagtgaggacgatcagaggtcaccttcctgtcttggttttggcaggttttgaccagtttctttgctgcattctgttttatcagcggggtcttgtgaccttttatcttgtgctgacctcctgtctcatcctgtgacgaaggcctaacctcctgggaattcagcccagcaggtctctgcctcattttacccagcccctgttcaagatggagtcgctctggttggaaacttctgacaaaatgacagctcctgttatgttgctgctgctgccgccaatggacagcctttaacgtgcccgccagccctgctccaccgccggcctgggctcacatggccccatccctcctcgaacctcctagcctgttagttactcaaatctgcaagctctctgccttctcagggccttcaataaatgcatttcttctgtctggaaggctcttcctttccctcttctagccaattcctattcatccctgagtttcagattaaaagtcacttcctttggaaaccttacttcgctacttcgctacttactgcactacttcgcagcatcacaactatgatggaaatccttacttacgttaaatatctggtttctaggtcacctccctgacggggacggtagggaccgtcttctcgttcatcagtagggaagtagctatggcagtgcctgatacaaaataaactccaaatgtgtatttattagatggttggatggaagttatttgcgtgtgaaagcgcgttttacccgaaggcgctctgtgagggccagcgggtccccttcggccctggagccggggtcacacgctccccaccgcgtgcggtcacgagacgcccccaagggagtatcctggtacccggaagccgcgactcctggccctgagcccgggcttagccttcgggtccacgtggccggaggccggcagctgattggacgcgggccgccccaccccctggccgtcgcgggacccgcaggactgagaccatggaggcggtggcggtggccgcggcggtgggggtccttctcctggccggggccgggggcgcggcaggcgacgaggcccgggaggcggcggccgtgcgggcgctcgtggcccggctgctggggccaggccccgcggccgacttctccgtgtcggtggagcgcgctctggctgccaagccgggcttggacacctacagcctgggcggcggcggcgcggcgcgcgtgcgggtgcgcggctccacgggcgtggcggccgccgcggggctgcaccgctacctgcgcgacttctgtggctgccacgtggcctggtccggctctcagctgcgcctgccgcggccactgccagccgtgccgggggagctgaccgaggccacgcccaacaggtaccgccccgaagcttccccgcgtccgcccgaggcgcttaccccctcccggagccgctgccacccaaatcgggaggctgagcggggagcgctggccggaaggcccagctgcgccgcctccagcagctgtgtggccttgagccagccactctgcctttcagagcctcggctggcccacctgaaaaacggaaagaagacgcctaccgtgcagtgttattgtgaggatttgcacgatgatgggcatagaatttgtggtgcacaattggtgatgagtgaattttcttgccttcctcccccaccttctctttgaacctgcggactgaggaaggacgcctccatcccccaccctacaggcctgtgttccagcgcctgccacactatggagtgatgtgttcacacagctgtcctcccctgcccatctgttagactgtgggggcagggattccccgttccaggaaaacaccgtgcagaggaggggctctggcagtgtggcatgaaagtggaatatgccacccaaatacccgccaggctagagggccctgggagagtgcaggggacgagtgcctcagaagcccagccccggtacctggtctcagctccacctggggtgggtcccagtgtgcagcagaagggccgagtttggagcccctcccctctcctctaggtgggggatgggggatttgttccagggccgtggaccctccagggtgggatgcgcccctgctcatgacactgcccgcaggtaccgctattaccagaatgtgtgcacgcaaagctactctttcgtgtggtgggactgggcccgctgggagcgagagatagactggatggcgctgaatggcatcaacctggcactggcctggagcggccaggaggccatctggcagcgggtgcgtgcccactgtcccttccccaccctcctctatggcgggagccaccgtaggtgttttcacccgccccccagcatgggcgcagtgtctctctctagaagtgctttcagcgtgcacagtggcttgggcctcctaaaaactgaggcttccggccgggcgcggtggctcacgcctgtcatcccagcacttcgggaggcctaggcgggcggatcaggagttcaggagatcgagaccatcctggccaacattgtgaaaccccgtctctactaaaatacaaagaaatagcaacctgggcaacagagcgagactctgtctaaaaaaaaaaaaaaaaaaaactgaggcttccagtttgaggagtggggctccttcccccatctcccctatgcagccaatcacctggtcccttggatccaactcatgggcagctctagatctgcctccctggaagcttctgtgctgcaatggctgctccaggctctgcttaagctcttcacacagttgccctgcccttccatctggcactcttgctccatgaagccttctaaggccttcctgttgggggaaagcccctttgtgccccatctcctcacccatgcgacaaaggcaacacagtgaactcacctactcacaggtctctttcctctgggctgtgggctccttgatggcagcgttcggattttgtctcagtagccctagcacccagcacaaagaagcaatgagtgaatggttgttgaatgaatgaatgaatgaatgaagatgaatatatttctatgtgtgggcccttcttcctcaggtgtacctggccttgggcctgacccaggcagagatcaatgagttctttactggtcctgccttcctggcctgggggcgaatgggcaacctgcacacctgggatggccccctgcccccctcctggcacatcaagcagctttacctgcaggtaaaaggatggaaaagggaaggggcagaatcggtgatagatggtcatgggcccaggaagggtggtattaggccggccccagggctcttaactgaggcggggggctgcgtgtatcctgggagatgagggccttctcataggacagcagtggccatgctcaccacccttccttctgttcctccagcaccgggtcctggaccagatgcgctccttcggcatgaccccagtgctgcctgcattcgcggggcatgttcccgaggctgtcaccaggtgaggttccgctcaccccctccacttagctcagagagggaattttattcccttctagaacatgacttaaaaacttaagctctgggccgggcgcagtggctcacgcctgtaatcccagcactttgggaggccgagttgggcggatcacctgaggtcaggagttcgagaccagcctggccaacatggtgaaaccctgtctctactaaaaatataaaaattagctgggcatggtggcacgcgcctgtaatcccatctacttaggaggctgagacaggagaattgcttaaacctgggaggcagacgttgcagtgagtcaagatcacgccattgcactccagcctgggtgacgagcgaaactctgtctcaaacaaacaaacaagctctggacgtaggcctgggtttgatttctgactctgctactaattagctgtgtgacttcgggcagatgacatgactgctctgtgcctcagtttccttacttgtaaaatgggatctctacccacttcgctgtagggtttgtaattatctctcgatctatctgtgactttgcacagagtgctagcaaatggcagcccttgggagtggcagcaggggtgctccagtgtcccttgtccctcctgttcctctgtgcttcccagccatcctctcacatgtggttgggaaaagtcttcaaggctcacctgagacctcccctccttcaggaagccttgctagtgccccgcatgacctcctttgcacctgctaatgtctggctcccatactctcgtaggacttaatgcatgccagtggcctccctgcccgcctctttgcccccatcaccaggtggcaggaaactcactcattcattcaataaacttggtccagctgtctgaggctgccagaactggctgtgctgggtcctgggaggcggcaagaaaggtgcccaagggcttacccctgataggagagatatgttggctgaaggatacaatgtggggacaaggacaggaatatatgtgggttccgctctcctctgccgggagagaggggcaggaagggctcagggcagagcccagccttgaaaaatgagtgttgcttggacggacgcttggctaatgcttgtaatcctagcgttttgggaggctgaggcgtatggatcacctgcggtcaggagttaaagaccagcctggccaacatggcgaaaccccatctctactaaaagtacaaaaattagccaggcgtggtggcgggctcctgtaatcccagctactcggtaggctgaggcatgagaatctcttgaagccaggggccagagactgcagtgagccgagatcacaccacttcactccagcctgggtgacagagtgagactccgtctcaaaaaaaaaaaaaaaaaaaggaaagaaaattaaacacctcatgttctcactcatagtgggagttgaacaatgagaacaacatggacacaggaaggggaacatcacacaccggggcctttcgcggtgtgggggtcaaggggaggagtagcattgggacagatacttaatgcatgcggggctgaaaacctagatgatgggttgatgggtgcagcaaaccaccatggcacatgtatacctatgcaacaaacctgcatgttctgcacagaactgaactgaaagtataattaaaaaaaaaaaaaaaagctgggtgcggtggcccacacctgtaatcccagcactttgggaggccgagacgggcggatcacaaggtcagcagatcgagaccatcctggctaacacagtgaaactcagtctctactaaaaatacaaaaaattagccgggtgtggtggcgggcacctgtagtcccagctactagggaggctgaggcaggagaatggcatgaacctgggaggcagagcttgcagtgagctgagaatgcgccactgcactccagcctgggggacagagtgagactctgcctcaaaaaaaaaaaaaaaaagaaagaaaaaggagcgttgcttgtttcaggccacaggaaggggagagatagtgaaagtttttcagagaaggtggccagggaaggagaagaaaggactgtaggcagagagcatagcctgtacaaagccatagaggcaagagaaaccaggagctgtagagaagttggcaaggctgttgaacactatggtgaacactatggcggcttccatgaaatatctgagcttttgctccccactagggtgttccctcaggtcaatgtcacgaagatgggcagttggggccactttaactgttcctactcctgctccttccttctggctccggaagaccccatattccccatcatcgggagcctcttcctgcgagagctgatcaaagagtttggcacagaccacatctatggggccgacactttcaatgagatgcagccaccttcctcagagccctcctaccttgccgcagccaccactgccgtctatgaggccatgactgcaggtacagtgcctgggtggggtgggagagccccccagaccctcaaaaagaagggagtagcagatgtcagtaggggtaggcagagggactggaataatgcctcgccataacacacagtacttcatagtttaccaagcacgtgtacacatgcgttgtctcagtgaatcccactgtggttgagaggtgagctctggaagccaacaacctgggtcacacctcgcgctcctatttcctggccgtgtgacttatgactcatgacctccttcccagtgtctcgtttgcttttcctgtaaactgggactacctcataggtagaataacgcctggcccagagcaaaggccactaagagctagctatgaacaaggattttgtttcatctctgcgtggttgctgaagtaggcactgcaggcaggaggtgagtggatgtgcctaaaggcactaagtgcgcatcctgctacaaaactgtgaagccagggctccttcctgccacttaaaggaggagtggagcagagggcgcccaagtcaggaatgacttagtggagaggcgtctgtgttggccaggaagggaacagatcagctcagcctttcttgagcagtactgctccaagtgtgacccaaaaccagcagcagcagcagcagcagcccgagctgtgagatggcaaattctcaggccctacccaagacctgaaggagaagctacattttttttttttttgagacagatttcactctgttgctgaggctggagcacagtggcacaatctcatctcactgcaaccttcgtctcctaggttcaagcgattctcctgcctcagcctcccgagtagctgggactataggcacccgccaccacgcccggcaatttttgtttgttttgagatagagtctcgctctgtcacccaggctggagtgcagtggcacgatctcagttcactgcaacctctgcttcctgagttcaagcgattctcctgcctcagcctcctgagtagctgggattacaggcgccccccaaccacactcggctaatttttgtatttttagtagagacggggtttcgctatgtaggtcaagctggtttcaaactcctgacctcaaatgattcgcccacttcagcctcccaaagtgctgggattacaggtgtgagccaccttgcctggccaatttttgtatttttagtagaaacaggtttcaccatggtggccagactggtctcaaactcctgacctcaggtgaactgcccacctcagcctcccaaagtactggtattacaggcgtgatccactgcgactggccttgattttgtttttgagacagaatcttactctgtcgcccagactggagtgcagtggcacaatctcagctcactgcaacttctgcctcatgggttcaagtgattcttgtgcctctacctcccgagtagccgggattacaggcacctgccattacgctaggctaatttttgtatttttagtatagacagggtttccccacattggccaggctggtctggaactcctgggctcaagtgatccacctgcttcagcccctcagagtactgggattataggtgtgggccaccacgcccattcagaaacctccatgttttaaggagccctctgggtaactctcatgttcacccaagctgctgaaccctgtcctggagttttcagagggacgcgtatgtgccacagagcgtcccgctggtgggggtcatgggaagccatgacctgggatagacagtcgtctgtagagtggggtgaacattccctgggccctctgtttcatcactcctcttctctgttccccctacctcctgtccacagtggatactgaggctgtgtggctgctccaaggctggctcttccagcaccagccgcagttctgggggcccgcccagatcagggctgtgctgggagctgtgccccgtggccgcctcctggttctggacctgtttgctgagagccagcctgtgtatacccgcactgcctccttccagggccagcccttcatctggtgcatgctgcacaactttgggggaaaccatggtctttttggagccctagaggctgtgaacggaggcccagaagctgcccgcctcttccccaactccaccatggtaggcacgggcatggcccccgagggcatcagccagaacgaagtggtctattccctcatggctgagctgggctggcgaaaggacccagtgccagatttggcagcctgggtgaccagctttgccgcccggcggtatggggtctcccacccggacgcaggggcagcgtggaggctactgctccggagtgtgtacaactgctccggggaggcctgcaggggccacaatcgtagcccgctggtcaggcggccgtccctacagatgaataccagcatctggtacaaccgatctgatgtgtttgaggcctggcggctgctgctcacatctgctccctccctggccaccagccccgccttccgctacgacctgctggacctcactcggcaggcagtgcaggagctggtcagcttgtactatgaggaggcaagaagcgcctacctgagcaaggagctggcctccctgttgagggctggaggcgtcctggcctatgagctgctgccggcactggacgaggtgctggctagtgacagccgcttcttgctgggcagctggctagagcaggcccgagcagcggcagtcagtgaggccgaggccgatttctacgagcagaacagccgctaccagctgaccttgtgggggccagaaggcaacatcctggactatgccaacaagcagctggcggggttggtggccaactactacacccctcgctggcggcttttcctggaggcgctggttgacagtgtggcccagggcatccctttccaacagcaccagtttgacaaaaatgtcttccaactggagcaggccttcgttctcagcaagcagaggtaccccagccagccgcgaggagacactgtggacctggccaagaagatcttcctcaaatattacccccgctgggtggccggctcttggtgatagattcgccaccactgggccttgttttccgctaattccagggcagattccagggcccagagctggacagacatcacaggataacccaggcctgggaggaggccccacggcctgctggtggggtctgacctggggggattggagggaaatgacctgccctccaccaccacccaaagtgtgggattaaagtactgttttctttccacttaaactgatgagtcccctgggtctgtcaaaatgagaaggtcactgctgccacgcttgggaggactcagggctatagcatggccctggggtgggacctgttctcccatcccttgcctcacgtccctgtttttgtttgtttgtttgtttgtgacggagccttggtctgttgcccaggcttgagtacaatggcacagtctcggctcactgcaacctccgcctcctgggttcaagcaattcttgtgcctcagcctccccggtagctgggactataggcatgcaccaccacgccaggctaatttttttttttccaagatggagtcttgctctgtcgcccaggttggagtttagtggcaccatattggtttactgcaacctctgcctcccgggttcaagcaattctcctgcctcagtctaccagggagttaggactacgggcctgtgccatcacgcccggctaatttttgtatttttcatagagataaggtttcaccatgttggccaggctggtctttaactcctgaactcaagtgatccacctgcctcggccttccaaagtgctgggattacaggagtgagccaccgtgcccggccacgtctctctttttaacactaatgttaccctgacctttgaacgtagaatgcccttctgttgcaggaaaacctcttttcaaaccatgtttgtcctttgctggcatgccacagcaacagtcaccaacacagaagacttctgtgaccaaatatttggaggattttccccacacacaccaagcagcagacatcagctgggtgtcctccaattcagttccaatgtaatcaaccagagacagcatcagatcccacagggttagggtgcagatccatgagaccaccccctccttcccaacggttacaagtcctgatccctggaacttctgactaactggcttcaagttggagttcccatgacccccttcccctctttggagtcaactcatttgcgacagtgacccacgaaacacagggaaacccttattatgtttattgctttattacagaggaaaaaaatttttttctttcttttttgagacagggtctcactctgtcatccagaatgactgcagtggcaggatctggctccgtcacccaggctggagtgcagtggcatgatctcggctcactacagcctccatccccccaaaccccacgcctcagcgccccaccccgcaagtggctgggactctaagcatacaccaccacacccagctaatttttttgtagtttttgcaaagacggggtctcattctgttgccctggctggtcttgaactcctgagctccagcaatccccttgccttggcctcccaaagtgctgggattacaggcatcagccaccgtgcccaacctcaaaggatattttaaaggatagaaataaacagccatatgaagagatacagacagggcggtctggaagggcccagagcaggagcttctatctccatagagttggggttacatcaccctccaggcacatggatgagttcttcaccttctgtcagcctccacacgttcagctctcagaagcttcccgaaccctgtcctttgggccttttatggagaactccattggctgtccatgactgaagcatggacaactgtgataatgtgattgggcaaaaagggtctgatctaagcccagcaaggccagtccagattctttgggcctttgtgcagcattcctttctccagggtatggggcaaggacccactctggaatgaggatcctacaacccacaatcagattagaatcctgccttgggcagctgaaaagaggacaggagaaggtcaaagagaggaaaggctgttttttgaggcctgaggcgccccaacatgacaacgaaagactgtaaccatggtcatgtgagttatgagctaggaaccctggacgaaaccaacacatatacaatcatctcccacctcccaacacctttactttcacagcctctgcagcaaactgcggtcactataatcgctcctgtggcacagaggcatacccaggggaatctgcccagggggccactctgtgcccacgtgggaacccacatctgcttgtaaagcctcccctccctctgaccagaaacgaggacagtttgttgttccaagcagtgggctcatgtctgttttggctcagaacagggtggggagagcgggccagggacccgcaggagggcttatccttgagattgcgtgggagacacaacaaggggtgggggcccgcaggcggggcggggcgaagcaggtgatatccagcccagagccccagcctctccccacagtctcaccatggcctgcaccgtggtgctcatcaccggctgttcctcaggtattggcctgcacttggcaatacatctggctttggacccatcccagagcttcaaaggtatagataggtagggacagggagggagagaagggaaaagcccttggaggccagaagagaagtcagatcttcctcctctcccaaaacctccagtgtatgccacgttgagggacctgaaaacacagggccggctgtgggaggcggcccgggccctggcatgccctcagggatccctggagaggttgcagctggatgtaaggaactcaagctccctggccgctgcccgggaacgcgtgaccgagggccgtgtggatgtgctgggtgagcctcctggaagcatatgggctcctaggagccttctccgccctgcgttgaaaccaacatgtccccaggcccctggagcatgaggggacaggccgtgctgagggtgatgctgaggcgggctggttgggcctctgtccccgcagtgtgtgacacaggcctgggcctgctggggccgctgggggaggacgctgtggcctctgtactggatgtgaatgtagtaggtactgtgcgggtgctgcaggacttcctgccagacatgaagcggccgggttcgggacgcgtgttggtgactgggagcatgggaggattgatgggtgagtggcagggaccgggcccggagctccagattctttgtgtgcagagctgagccttgaaggcaggctccttagggggtggggtgcaatcagcttggaggggcactgcctgccgggggatgaccccctggccgctgcgcctcaggaacctcatcttcccacccaagggctgcctttcaatgacgtttattgcgccagcaagttcgcgctcgaaggcttatgcgagagtctggcggttctgctgctgccctttggggtccagtgagtcaacacccccgtctcctcaaccctcttaactctgacctagagatgccgagcaccctgtcctgcggaagccgctctggtctctgcccggcttacatttgctgcgtgccaggcacttaggctggagcattggcacgcattgtgccacttgctgacctggctgctgaagtgttggtattgttatggggaagctccagccaagagaggttaggtgactggcccaaggtcatgcagcggccggggatcccgccaggttcgaattctgacaccagggctacctggcagcctcagatgggtttgggagggctgtcgagcaataacccgctattcaaatgttctggttatccccagcgctctttccaccttcgggacgcagcggtgctgttctgggtcgtggccagggccggggtcggggccggtgctggggcaggagatgggacttggcgcctgggtcgcctccgtccctgcccacttgcggctctcgggccagcagcgtgagcctgatcgagtgcggccctgtggacaccgccttcatgcagaaggtgttgggcggtcccgaccaggtgatggaccgcacgaacacccggaccttccgcctcttgcactaatacctccaccacagcaaggagatctaccgcgaggaggcgcagcaccctgaggaggtggtgaaggtgagcggggggcgggactccgggagcgggggcggtgcgtcgtcctgcgcgcagcccgggccagagctcctctcccgccgccgcaggtcttcctcaccgctatgcgcgccccgaagccgaccctgcgctacttcacaaccaggcgcttcctgcaccagctgctgatgcgcctggacgacccctttggcttcgactacgccgccgccatgcaccgggacgtgttcgccgacgatcccgcagaggccgaggctggggccggggctggggccgaggccgggggcggggccggtgggatgggagaccctgagctcagcgatcctctggccgccccgcaagaaaggctccgtcagccactgtctcccgcgccctcctttgtctcctgggcctgtgcggtccctggggatgggacggcggtgacggctgtggatggctaattaagacagatcacgttagcccgttatatctgcgcggctaggcgcgatggctgtcgcctataatcccagagctttggaaggccgaggcaggaggatcgctccaggccaggagttccagaccagcctgagcaacatagtgagacaccccatctctaaaataaaaaaattagcacagtggcaccattccttgagctcaggagttggaggctgcagtgggcatgatcgagctactgctctccagcttgggcgatagagtgagacactgtcaattaattaatctaatcaaccaaccaacccaacaacccagaaaccaaggtccagaaagaagccagcccaggatcatgcctcaagtccacagtaaagcccagacacagtcactggatacccaaggggcatctgcaggacgagttaggtgggacttgggttggggtagagtcaggttgtgacctgcactccattagccatgagacctcaggcaagttccttgctttctctgagtgctttcctttcctttcccttttcttttcttttttgtttttcttttgttttgagacggagtttcactcttgttgcccagcctggagtgcaatagcgcggtctcagttcaccacaacctctgcctcccgggttcaagtgtagctaggattgcaggcatgtgccaccacgcccagctaattttgtatttttagtagagacgaggtttctccatgttggtcagactggtcttggactcccgacctcaggtgatccgcccgccctggcctctcagagtgctgggattacaggcatgacccaccccatccggccctctgagtctttcttatctgtaaaatgggtataataatacctatctaatcggttttagtaatggtggagataatgcctgaaagtgctagtatagaggtttaatacccagcaaggactgttattagaatgaatagtaatatgactactgtcacattttgcaaatgtgtaaagaagaaagagggctaagtgaatcaaagggagacagccccactcaccctgttctgccccagaggactgagcgatccccaccatctgggaagctgcctcaccaggaggtccagctggggctacaggactggctactttgctacaatggcccatctttcctgagcccagtggagggtcccaggggggcagaagtcattgataggggccagtagggttgtagagccactgtctgaacttctgtggaggtctggtgcaggggaggtgtgaacagataggaggctaggtgaggatgcagcagaggaagggggcaggagtgccccaggagggggcggtaccgaggcagggattcagctgggtctgagagggagggaaggctgagggggatggccctttggagtgggcagggacatgaccacagaaagcctgggaagtggaaacagacaggagcctgctggagctcttggagctttgtgtggggcactaggggaaggaggcaggcactccaccctgacctgcccctacctctggatgagggtcttctctgcctgttggatgatgtgctgcccctgctcttggaggaagaggcctcccagccaccccctcctgccagtcgccttgccctgctgacccagacagatctgctatccctacagcatccaggaaggccacagggagggggcccaggtggcatgggtttctgaggcctgggatctgctctcagtcccgctctcgccaaccccctttgcccctctgtgacagtgtgtgtacatatgcgtgcatgtgtgtacctgtgtggtgtggctcacaaggtcacccctgggggtgggataataagaggtaaagtgtgaccccctctcttccgtacattcattttttcaagcttgtgaatattcacattgttaatataatcttctgcagtcccatgacttcgaatagcacttagatgccgatgacccccccaccaaagaaaccccactgtctcccacagactccaggtctgtatctccaactgcctactcaatacaacacgtccacctgatacaatgaacttaatgtgtctaaaccccaattccacatttccagtcctcctaccggctcctcccccagtcttctctactttactatatgacaactccatttttcccaatactggttttaaaaaccctggagtagtccttgactccagtctctctcacctttcaaccaattcagcagcaaatactgacagctctacctttgctcatcaaagcatatccccaaatcaccctattccagactgcacactgtcatctctcccttcaattacagcagtagcctcctaactagttttcttgattccactcctgcccatcagcagtgaaattaccccagagcagttaaaatgatcttttaggatgggcacagtggctcacgcctgtaataccagcactttgggaggtggaggctggctgatccccttaggttgggagttcaagaccatcctcaccaacagggagaaaccccatctctactaaaaatacaaaaattagccggatgtggtgggacgtgtctgtaatcccaactacttgggaggctgagacaggagaactgcttgaacccgggaggtggaggttgcagtgagccagaatcgtgccacagcactccagcctgggcaagaagcgcgaaactccgtctcaaaataaaataatcttctaaaaatgacagggccaggtggggtggcacttttttataatccgagcactttgggaggctgaggtgggcagatcgcttgacatcaggggtttgagaccagcctggccaacatggtgaaactccgtctctactaaaaatactaaaaattagctgggcgtggtggcgggtgcctgtaatcccagctactcgggaggctgatgcaggagaatcgcctgaaccaggcagatgcaggatgcagtgagccaagattaagacactgcactccaacctaagcaatactttgtctcaaaaataaaaaaaagcctgggaaacaaagtgagaccccgtctctacaaaaaagtcaaaaaattagctgggtatggtggcagtgatggcacacacctgtagtcccggctacttgggaagctttttaatattttttgcagagaccgggtctcactctgttacctggcctggtcttgaactcctgggctccaacaatcccctttcctgggcctcccaaagtgctgggattacaggcatgagccaccgtgcccagcctcaaagcatattttaaaggatagaaataaacagccatatgaagagatacagacagggcggtctggaagggtccagagcaggagcttctatctccatagagttggggttacgtcaccctctgggcacattctgtcagcctccacacgttcagccctcagaagctcccgaaccctgtcctttgggccttttatggagaactccattggctgtccatgactgaagcatggacaactgtgataatgtgattgggcaaaaagggtctgatctaagcccagcaaggccagtccagattctttgggcctttgtgcagcattcctttctccagggtatggggcaaggacccactctggaatgaggatcctacaacccacaatcagattagagtcctgccttgggcagctgaaaagaggacaggagaaggtcagagagacgaaaggctgttttttgaggcctgaggcaccccaacatgacaacgtaagactgtaaccatggtcatgtgagttatgagctaggaaccctggacgaaaccagcacatatacaatcatctcccacctcccaacgcctttactttcacagcctctgcagcaaactgcggtcactataatcgctcctgtggcacagaggcatacccaggggaatctgcccagggggccactctgtgcccacgtgggaacccacacctgcttgtaaagcctcccctccctctgaccagcaaccaggacagtttgttgttccaagcagtgggctcatgtctgttttggctcagaacagggtggggagagcgggccagggacccgcaggaaggcttatccttgagattgcgtgggagacacaacaaggggtgggggcccgcaggcggggcggggcgaagcaggtgatatcaagcccagagccccagcctctccccacagtctcaccatggcccgcaccgtggtgctcatcaccggctgttcctcgggcatcggcctgcacttggccgtacgtctggcttcagatccatcccagagcttcaaaggtatagataggcagggacagggagggagagaagggaggagcccttggaggccagaagggaagtcagatcttcctcctctcccaaaacctccagtgtatgccacgttgagggacctgaaaacacagggccggctgtgggaggcggcccgggccctggcatgccctccgggatccctggagacgttgcagctggacgtaagggactcaaaatccgtggccgctgcccgggaacgcgtgactgagggccgcgtggacgtgctgggtgagcctcctggaagcatatgggctcctaggagccttctccgccctgcgttgaaaccaacatgttcccaggcccagggagcacgaggggacaggccgtgctgagggtgatgctgaggcgggctggtcgggcctcttgtctccgcagtgtgtaacgcaggcctgggcctgctggggccgctggaggcgctgggggaggacgccgtggcctctgtgctggacgtgaatgtagtagggactgtgcggatgctgcaggccttcctgccagacatgaagaggcgcggttcgggacgcgtgttggtgaccgggagcgtgggaggattgatgggtgagtggtagggagtggcctcggcagctccagattctttgtgtgcggagctgagccttgaaggcaggttccgcggggggggtggagtggggtgccgtcagcttggaggggcaccgtctgcccggggatgaccccctggccgctgcgcctcaggaacctcgtctccccacctaagggctgcctttcaatgacgtttattgcgccagcaagttcgcgctcgaaggcttatgcgagagtctggcggttctgctgctgccctttggggtccagtgagtcaacacccccgttccccgaaccctcttaactctgacctagagacgccgagcaccctgtcctgcgggagccgctctggggcgatctccctggccctctctgcccggctcacattagctgtgtgccaggcacttgggctgggcgcatggcacgcattgtgccacctgctgacctagctgctgaagtgttggtattgttatggggaagctccagcccagagaggttaggtgactggcccaaggtcacacagcggccagggaccccgctagattcgaatcctgacaccagggctcccttgtagcctcagatggatttgggagggctgctccggcaggaacccgcgtttcaaatgttctggttatccccagcgccctttccgcctcacttcccagcgcagcggtgctgctcgcggtcgggggccgggacgtggttggggctgggactggggttggggctgggactggggcctggctggcgtccgccccctcccactcgttgctctccggccagcagcttgagcctgatcgagtgcggcccagtgcacaccgccttcatggagaaggtgttgggcagcccagaggaggtgctggaccgcacggacatccacaccttccaccgcttctaccaatacctcgcccacagcaagcaagtctttcgcgaggcggcgcagaaccctgaggaggtggcggaggtgagcgccgggctggactccaggagtgggggcggtgcgtcctccggcgcgcagcggtggccacagctctcctcccgccgccgcaggtcttcctcaccgctttgcgcgccccgaagccgaccctgcgctacttcaccaccgagcgcttcctgcccctgctgcggatgcgcctggacgaccccagcggctccaactacgtcaccgccatgcaccgggaagtgttcggcgacgttccggcaaaggccgaggctggggccgaggctgggggcggggccgggcctggggcagaggacgaggccgggcgcggtgcggtgggggaccctgagctcggcgatcctccggccgccccgcagtaaaggcttcctcagccgctgtctcccgcgcccttctttgtcccctgggtctgtgtggtccctggggatggggcggcggtagcagctgtgggtggctaattaagatagatcgcgttagccagttttaccagcgcagctaggcgcgatggctgtcgcctgtaatgccagcgctttgggaggcggaggcaggaggatcgctcaagccccggagttggagaccagccagagcaacacagtgagacccccatctctacaaaaataaagaaaatttaaaaatcagcacagtggcaccattccttgagcccaggagttggagggtgcagtgagcatgatggggccactgcactccagcctgggtgacagagtgagaccctgtcaattaatcaaatgaaccaaccaaccgaaaaactcagaaaccaaggtccagaaagaagccagcccaggatcacacctcaagtccatattaaaggccagacacagtctctggataaccaaggggcatctgcaggaggagttaggtgggaattggcttggggtagagtcaggttgtgacttggaccccattagccatgagacctcaggcaagttccttgctttctctcagtctttcttttctttctttctttcttttttttttattttctgagacagagtttcgctcttgttgcctaggctggagtgcaatggggcaatctcggctcaccacaatctccgcttcccagattcaagtgattctcctgcctcagcctcccaagtagctgggataccggctaattttgtatgttcggtagagacggggtttctccatgttggtcaggctggtctcaaactctcgaccttaggtgatccgcccgcctcggcctctcagattgctgggcatacaggcatgagccaccgcgaccggccctctgagtctttcttatctgtaaaatgggtataataatacctatctaatcggttttagtaatggtggagataatgcctgaaagtgctagtatagaggtttaatagccagcaaggactgttattagaatgaatagtaatatgactactgtcacattttgcaaatgtgtaaagaagaaagagggctaagtgaatcaaagggagacagccccactcaccctgttctgccccagaggactgagcgatccccaccatctggcaagctgcctcaccaggaggtccagctggggctacaggactggctactttgctacaatggcccgtctttcctgagcccagtggagggtcccaggggggcaggagtcattgataggggccagtagggttgtagagccactgtctgaacttctgtggaggtctggtgcaggggaggtgtgaacagataggaggctaggtgaggatgcagcagaggaagggggcaggagtgccccaggagggggcggtaccgaggcagggattcagctgggtctgagagggaggcaaggctgagggggatggccctttggagtgggcagggacatgaccacagaaagcctgggaagtggaaacagacaggagcctgttggagctcttggagctttgtgtggggcactgggggaaggaggcaggcactccaccctgacctgcccctacctcggatgagggtcttctctgcctgttggatgatgtgctgcccctgctcttggaggaagaggcctcccagccaccccctcctgccagtcgccctgacctgctgacccagacagatctgctatccctacagcatccaggaaggccacagggagggggcccaggtggcatgggtttctgaggcctgggatctgctctcagtcccgctctcgccaaccccctttgcccctctgtgacagtgtgtgtacatatgcgtgcatgtgtgtacctgtgtggtgtggctcacaaggtcacccctgggggtgggataataagaggtaaagtgtgaccccctctcttccgtacattcattttttcaagcttgtgaatattcacattgttaatataatcttctgcagtcccatgacttcgaatagcacttagatgccgatgacccccccaccaaagaaaccccactgtctcccacagactccaggtctgtatctccaactgcctactcaatacaacacgtccacctgatgcaatgaacttaatgtgtctaaaccccaattccacatttccagtcctcctaccggctcctcccccagtcttctctactttactgtatgacaactccatttttcccaatactggttttaaaaaccctggagtagtccttgactccagtctctctcacctttcaaccaattcagcagcaaatactgacagctctacctttgctcatcaaagcatattccaaaatcaccctattcgagactgcacactgtcatctttcccttcaattacagcagtagcctcctaactagttttcttgattccactcttgcccatcagcagtaaaattagcacagtgcatttaaaatgatcttttaaaaatgacagggccgggcgtgatggctcatgcctataatcacagcactttgtgaggctgaggcggacgttattgcttgaggtcaggagtttgagaccaacctggccaatatggtgaaaccctgtgtctactaaaaatataaaaattagccaggcatggtggtgggcgcctgtaatcgcagctgctccagaggctgacaaaggagaatctcttgaaccagggaggtggaggctgcagtgagccaagattgggacactgcactccagcctgggcaacagagactttgtctcaaaaaaataaaaattggccgggcgtggtggctcatgcctgtaatcccagcactttgggaggccgaggcgggtggatcacctgaggtcaggagttcaagaccagcctggccaacagggtgaaaccttgtctctactaaaaacccaaaaaattagccaggcgtggtggcacgtgcctgtaatcccagctactcaggcggctgaggcaggggaattgcttgaaccccggaggcgtacgctgcagtgagtggagattgcgccattgtactctagcctgggcaacaagagtgaaactccatctcaaaataataataataaaattaaaaaaaatttaaaataaaaaagggagcctgggcaacaaagtgagaccccgtctctacgaaaaaacaaaaaaaatagttgggtgtggttgcacacatctgtagtcccagcttcttgggaggctgacatgggaagactgtttgagcccaggaggttgaggccacagtaagctgtgggcacaccactgcattccagcctgggcaagagagggagaccctgtctcataaaagaaagaaagaggccaggtgtggtggctacgcctgtaatcccaacactttgggagcccaaggccggtgaatcacttgagatcaggagttcgagaccagcctggccaacatggtaaaaccccgtctctactaaaaatacaaaaattagctgggcgtggtagtttgtgcctgtaatcccagctactcgggaggctgaggcaggagaatcgcttgaacccgggagacgaaggttgcagtgagctgagatttctccactgcactccagcctgggtaaagagtgagactcggccgggtgcggtggctcatgtctttaatcccagcactttgggaggccgaggcgggtggatcacctgaggtcaggagttcaagaccagcctggccaacctggtgaaagcctgtctctactaaaaatagaaaaattagctgggcgtggtggtgggtgcctgtaatcccagctactcaggaggctgaagcaggagaatcacttgaacctgggaggcagaggttgcagtgagccgagatcatgccgttgcactccaacctgggtgacagtgagactctgtcttaaaacaaaacaaaagaagcaaagtttattttgctcagagcttcacagttttaggggctggaaagtgcaagaacttcatgcagtatctggcaaagggctgtcccaggatggaagggcagaaggtggaagcaaatgagagacacgaaattgggccaaatgtcgtccatccatcaggagccactcccatgataacagtatttatctattcaagagggcagagccctcatgatctaattatcttttttttttttctcctgcctcggcctcttgagaagctgggattttaggcgcatgccaccacaccccgctaatttttgtacttttagtagagacggggtttcaccacgttggttgggctggtcgcaaactcctgatctcaggtgatccacctgagatccaccactttggcttcccaaagtgctgagattacaggagtgagccacctcgcccagctgacctaattacctcttaaaggccccaccctgcccagtgcagtggctcaggcctgtaatcccaacactttgggaggctgaagtgggaggactgcttgagttcaggagttggaaaccagcccaggcaacacagcaagatcctgtctgtatgaaaaaaaaaattttttttttaattagccaggtgtggtggcacacatctgtagttccagctgctcaggaggccaaggcagaggactgcttgagcccaggcagttgaggctgctgtgagccatgatcaacccactgcactccagcctgggggacaagagtgagaccctgtctcaaagagaaaaaaagtcccatctcttaagacagtagcaattgaattttttatttcaacatgagttgtggcagggacattcgaaccatagcaccaaggttctccccaaagctctccaagaccttctttgatctggttcctgccccctttctgatctcatctcccaccaatctccatctacatcacccagttcagccctcctgcctcagggcctttgtacttggccccctctgggtcacattccctgatctctgattctatgtcttccttcagatttttgctgttttcctgaaccaccttatctaaaatagcctctcagcttctccactatagctcccttactctgctttacttttgttcttatcctttatcaccagtagatatattatggatttgggttttttaatttaatttttattttttttggagacggagtctctctgtcacccaggctggagtgcagtggcgtgatctcggctcattgcaatctctgcctcccaggttcaagcgattctcctgcctcagcctcctgagtagctggaatcacaagtaccgccaccacacccagctaattttttgtatttttagtagagacggggtttcactatgttggccaggctagtcttgaactcctgacctcaggtgatctgcctgcctcagcttcccaaagtgctgggattacaggcgtgagccaccgcgcctggccatgtattatagatttatttatggtggcatgattcctgtctgcaaccccaagacacacagtactctataccccaggatggcagggacattgttttgttcactggtccatccctgtgggaggcagtaaaatacacatttactcaataaaaatgactctgtatgtggtgtgtcagactgtgtgtccagatgtcttgggacattctctggcagcctttgctgtttgtgtcttcaaatcagaccctatctttaaatctaacatgtctcctgtgagaagcctggtcccttaatacctttgtggctctacaactcttccctccttgactgtatctcttcctccaggtctttgctgttttcctgaatcaccttatctaaaatagcatctccttttctccatcataagcccaggttttgtggggctgggggcttatttgcttttggagaccgtcttcaagaatacaaaagataaacacaaaattacatataaaagtgagttttgtttttttttttaagtttcggataccacggcacattactggaatcttggagactggcttctctcccttttgatctccatgcacaacttacctgagatgtattctaatagcaacctggcttcccctccacactcagcctttcaagcgcccattagcttcgcagtaaatctcccacactaggtatccagcctttgcctttttcttttttctttttttttttccagagggagtttcgcttttttttttttttttttttttttgagacggagtctcactctgtcacccaggctggagtgtagtggtgcgatctcggctcactgcaagctcttcctcccgggttcacgccattctcctgcctcagcctcccgagtagctgggactacaggcgtctgccaccatgcccggctaatttttttttgtatttttagtagagacggggtttcaccgtgttagccaggatggtctcgatctcctgacctcgtgatccgcccgcctcggcctcccaaagtgctgggattacaggcgtcagccaccgcgcccggccgggagtttcgctcttgttgcccaggttggagtgcaatggcacaatcttggctcaccgcgacctccgcccacgggttcaggcgattctcctgcctcagcctcctgagtagctgggattacagccatgcgccaccacgctcgtctaattttgtatttttagtagagacaaggtttctccatattggtcaggttggtctcgaactcccgacctcagatgctctgcccacctcggcatcccaaagtgctgggattacaggcgtgagccaccgcgcccaatcagcctttgcctttttctcctgtccacagagaccccgcaaacaagcgcatcagaggatctgggtggtgcgagagcctcctacagcagccaggtacacacaaggcctcagtttttccatctgtgaaatgggtacgtggacagacctgtccagtagcctcccatgtgagaatcctcggactgagagggtactaggagggctaatacagcgcagccctgtgattccccacctctgtccctggaatgaaggaaatctgggtgttagttctggctttgccgatgcctcttgggtggcctggctgaaactaatctctcctcatcaggccagaagggaatctgtgaaatgggctttgaaacctgccttgcctttctccgcccggtcccagcgggggtccgatcggcatcaaggcttcacccactcccagagccttcgggatcagccccaccccatcagcaggacacagcccatgccactggaaatctcgcgagaatcccgcgctgaagcgaagtcgagacgtttgaccttcctccgtttccgtagttccgagttgcggtttctccgttagtgcttccgggttgcagccagggaagcctccgcggtggtgcaagtggaacccaagccttgaggtttcagtgagtagggggccgacgtgagctttagcgtccccctttagcctccctcttcgattccttgaagaccctggtgcagcttagcaagagggcccaggatttttggatccccagccctgtgacaagggttcctgtccagtttccccctcccaggatttcgactcagttcagcgaagtcaccgccccgtctgagaaatgaggacaccaaggcttagagcacagccccgaggcgccgtctaccaggccccgtcccctcccccggctcctgtcggtcagcactgaaaccccgtccctgctccaggcctccttctctggggtccaaggtcccatacaggcctctgcctcggccgcaggcccttcagtcaccgtcgcctcgtctccctgactgtccgcaggcctgggcagcatggccgtattccggtcgggtctcctggtgctgacgacgccgctggcctccctagcccctcgcctggcctccatcctgacctcggcggcccggctggtgaatcacacactctatgttcacctgcagccgggcatgagcctggagggcccggctcagccccagtccagccccgtgcaggccacgtttgaggttcttgatttcatcacgcacctctatgctggcgccgacgtccacaggcacttggacgtcagaatcctactgaccaatatccgaaccaagagcacctttctccctcccctgcccacctcagtccagaatctcgcccacccgccagaagtcgtgttgacagatttccagaccctggatggaagccagtacaacccggtcaaacagcagctagtgcgttacgccaccagctgttacagctgttgtccgcgactggcctcggtgctgctatactccgattatgggataggagaagtgcccgtggagcccctggatgtccccttaccctccacgatcaggccagcttcccccgtggccgggtctccaaagcagccggtgcgtggctactaccgtggcgctgtcggtggcacgtttgaccgcctgcacaacgcccacaaggtgttgctcagtgtcgcgtgcatcctggcccaggagcagcttgtggtgggagtagcagacaaagatctgttgaagagtgagtaagagggaccctggactagggtggaggatccccaaatctccccacccccgacccttatgccgagatcaaggaagggtagggccattcattacttcccacccttcccaaatgtcacagtggttgacactcaattggtgctaaggccattttgtcaaatgaacagctttctcagcatgtggtccagtcaccactcaatcagaataccccaaatgtgaagcaaagggatctgcattttagcaagttttccaggtgatacaccctaatgagacactgggaatgaatgggtgagtgagctgcaggtagcagtgccacagacaggaggaggaaactcaagcatggcatgggtcttggaattttccatctgcctctgatgccctctggcactgctcgttctctggagtggtttcctggtggcttattctctggacacatgccagcccttggagtgactattgtgcttgcctgtttcttcaccttcatgctcccctcaccatcaccataggccttaccagttgaaccctttctgccaccccctctggggatactgtacttagggacactttttcccaaactggcccatactctcctccccaataaaaagatctcactgttcttctgggctccttccccaggcaagttgctccctgagctgctccaaccttatacagaacgtgtggaacatctgagtgaattcctggtggacatcaagccctccttgacttttgatgtcatccccctgctggacccctatgggcccgctggctctgacccctccctggagttcctggtggtcagcgaggagacctatcgtggggggatggccatcaaccgcttccgccttgagaatgtaacccctgagggagactggcagagggagtggatgggggacggggaaggccattttgagggggctgttggaagtaccatggccccagaggagagaagtgggggctcagggtggtgggaagaagcaaggaggaactggttctcagtttgcccgctgagtcggaggaggaggagcctgggtaggaaggggaggatgggggggcaggttggatgtcagggtcttcctctcactccctccttccctctttttaccctttcctctttaccccaggacctggaggaacttgctttgtaccagatccagctgctgaaggacctcagacatacagagaatgaagaggacaaagtcagctcctccagcttccgccagcgaatgttggggaacctgcttcggcctccatatgtaagctcctctccctccttccctcctgcttggtgtcctggcaatgctggagagtagaagctgaggggctcagccccaggcatgaggctgagggccccagtaactgtgggttccctttcacctatccccaggaaaggccagagctccccacatgtctctatgtaattgggctgactggcatcagtggctctgggaagagctcaatagctcagcgactgaagggcctgggggcgtttgtcattgacagtgaccacctgggtcatcgggcctatgccccaggtggccctgcctaccagcctgtggtggaggcctttggaacaggtaataactggggaaggctgaaagtggcctggagtgaggagctagccaggcctctgtgctcagttgtctgtctgtgttgtccagatattctccataaagatggcatcatcaacaggaaggtcctaggcagccgggtgtttgggaataaggtaaacaataacttcctaagggctcctaagccgctactagacccaggggtcagggtccagtggacctctctggtctggcccagaatgccatttccattgatctgttcccaacaccaccttgctcgggctggctgcctcttctagagaaggtaacctctgccctctgttcccctccccagaagcagctgaagatactcacggacattatgtggccaattatcgcaaagctggcccgagaggagatggatcgggctgtggctgagggtgagtgggagggaggatggcaacagctaaggggacagttaagctgtttcttcccctgggagcttccctgcccaacgtgggactgtctgttcaccctgggactgtgttctgcctgggagaacgtcggcactgctggcggtgactggggtctccccacaggaaagcgtgtgtgtgtgattgatgccgctgtgttgcttgaagccggctggcagaacctggtccatgaggtgtggactgctgtcatcccagagactgaggtatctcgccccaccccccacaccatccctactgcagatcctatcctgtgagctggaattcttcctgacaaatgtctcgtctgtgctcaggctgtaagacgcattgtggagagggatggcctcagtgaagccgcggctcaaagccggctgcagagccagatgagcgggcagcagcttgtggaacagagccacgtggtgctcagcaccttgtgggagccgcatatcacccaacgccaggttggtgcccagggcaaggccgggttgtggggaaggagtctccagtgggtactgcctgaccctgccctctcttcctcccaacatcctggcctgtctgaaggtggagaaagcctgggccctcttgcagaagcgcattcccaagactcatcaggccctcgactgaaaagttctcagtggggccagactggctcctggagctgacaagcgaccccgtggtgaggagaaatgggggccttgatgctcaccctggttcaggcccagaggtccaagctatactgtgcaggacatggccaggcctggtggacacaggaagcctacccaacacgctggtatttggccaacactgaggatgtggttcatgggggagcagtcccctccccactcttgcccatgggtgactcttacccacagctgactagggccagcgcaaatactggaacctgtaacagaattaaaggtgaatgttctgagatgttgcttgtatggtgtctgcttcctgttccaatgcccctaagtatctttgggatccttaagccacaagtgcagggcccaggcctgagctggaagcctgggcaatgcagtggttaagagaatggcctttgaggctagccagaggcgagctttggccctcccactgaccagctgtgttcttctgagtaaggtgtagactttctaggtactgccgtgttttattgtttttgttttgtttttaatatgagaggccgcataacctagctagcaggttctttgcaagggttcattccacatgcatcctgccagacactgggctgggtgttggaagatcagccttccgcgcgccaggcggggcctctgccctcacagagcttgcagcctggtggggtcggacgatgtggctgggggcttctctgcccggttcctgacacaccggccagcagtgcaggtccggtgagcgcggggaggccgccctcagggtaacgtggggagccggccggccggacagtgcgcgtgcacacactatctgcggcggtgtgctgacaagccaattgaggggactccatcttacaaaacgcgcttcatgtcgccgccattccactgcctaacccggggagggcaggcacggcggggagcagtctcgaaggaggctggcgccaggccaagcgccgggccttgacggctggaaccgtggagtaaagtctttgggctgcgcatgcgcgatgcttcgccctgccccacctctcggtcgcggattggcgggcgcgggtcacgtgggcacgccacccgcttcctcgccgcagggggcccgcccgctggcccgtttccggtccggtgggtacaagatgacggagccgggcgcctctcccgaggacccttgggtcaaggcaagccccgtgggcgcgcacgccggcgaggggagggcgggtcgggctcgtgcacgtaggggggccggaagacgaggggcttccctcctgtccccaaagtcccccacgctctccgtgccccggggctgcagagaagacagctctcaccccgcgtgtgccaaggtggggagacaaacgaggcgtgtgcgcgcgagtcgggggaacggggcactggggtggagtaggggcggaagggatcatacacaggggaggcactcgcacgccctagcctgtgccagtctcgggggactcattaagctgcccgcgcaccccgggctgtgtgtgtgcaagcgcgcagggtgacagaggcgccttcccggaatggggggcgcgctgtgcgtgcctgcagtggaaggggcgcctccccctaggggcggaggtctgacgggcccttcccgtgctctgtgccgcaggtggagtatgcctacagcgacaacagcctggaccccggtgagtagctgccccatcttaagctctagagggacactcccgcccaggctctctagattcttgtggcgttgccaaccacgcctgagcacagtccactctccctgagcagagttcctggcttgagacagcaggagctgaaggacaagggcagaaaacaactgagggtgacacctagttccctctgctctggaacagggaagtggtggaactgatcactcaccactcagtggagcagctgatcactcacaccctcatcacgtccacatgcccgtttgtgagccaggggggtatcatgcaggcctatggagcagtgtagacactagggagcagagcactgcagcgtggtctggcaggaagtggggggcccagtatggttggctttgggttgaagggaagaggtcagcatttaagaaagccattgtgtggccgggcgcggtggctcacccctgtaatcccagcactttgggaggccgaggcaggcggatcacgaggtcaggagaccgagaccatcctggctaacacggtgaaaccccgtctccactaaaaaatacaaaaaaattagccgggcgtggtggcgggcgcctgtagtcccagctactcgggaggctgaggcaggagaatggcgtgaacctgggaggcggagcttgcagtgagccgagatcgcgccactgcactctagcctgggcgactgagcgagactctgtctaaaaaaaaaataaataaataaaagaaagccattgtgtcctacaggtgtctgagggtctggcaatgttccccaccccaccccttagtgattggggcctctcttttccagggctttttgtagaaagcacccgcaaggggagtgtagtgtccagagctaatagcatcggttccaccagtgcctcttctgtccccaacacaggtaggcagtaacatcccccccgacctcggggggctcagatatgtcataattgtagtacctttcctagacagggaagccccagccatccacacaggggtgctggagccaaagtatcagacacaaggtctcaccatctttcacctcatctggaacattaggtggttctgtccatctgccttctctggacaccaggttcttcccagctggggaaaggtgggctagctggaccccactgggccccaagatgacctttccctgcccccatctctgagcgtagatgatgaggacagtgattaccaccaggaggcctacaaggagtcctacaaagaccggcggcggcgcgcacacactcaggctgagcagaagaggagggacgccatcaaggtgaacagggaggcctgtgcctcagccagtgcgggagggccctgcatagtttagcttccctgtgccctgacccactcagacagtcccaggcaccctagggggtgggcaggtagtatagtcccaggcacaaacacctcccttgcagccttcccaccccattgagtttgtgagcatagaacttggtgtcatggaggaactttgtgccattttgctttaatctctcagggttaaagaacccatttcccctgctgtttccacagagaggctatgatgaccttcagaccatcgtccccacttgccagcagcaggacttctccattggctcccaaaagctcagcaaagccatcgttctacaaaagagtatggctagggaaagcactggaggggatggagccaagcggggctgtgaagaggccagtgcctcctacccacccatggctcggccttggtgtggtgattgccatgggatagttggggtctggggtaaggggaacaaagtcagccttatcttcttggttgagaatacttctgtacctgtcctttttttcttgcccccaccctagccattgactacattcagtttttgcacaaggagaagaaaaagcaggaggaggaggtgtccacgttacgcaaggatgtcaccgccctaaagatcatgaaagtgtaagaggggtgctgaatggggggaaccagaacttctgaggcaacttcattgcacaccctcccttgttcaaaggccacatcagttactgctgtacagataatactcttagttcctgagctagccagtaggactgtgtatccccaactgtccttacacatggcagacactcaggaaatgcctgttggattaatgtaaggaaggttggagagagagggccacctttcctgacctggaagcagtatctccctgatactgaaccccacccagaagctctctggggctgccattcctgggagtacacaggatagtcccgtcattcttcttgggtgggcggagctgctgcagcacctcagccctggcctgcatgcttttaggaactatgagcagattgtgaaggcacaccaggacaacccccatgaaggggaggaccaggtctctgaccaggtcaagttcaacgtgtttcaaggcatcatggattccctgttccagtccttcaatgcctccatctcagtggccagcttccaggagctgtcagcgtgtgtcttcagctggatcgaggagcactgtaagcctcaggtatggggcaacaataggcacagggtctgcggttttctctaccatcaagcaaagtggcccaagccatcagctgttgagaaaagcgtggcagctgcttttagatcttaagggcgtttctacagctttgagggccctggtattttcccttttctttgctgtctaacccacatcttcatgttacggtttcattcggcaagtgtgacgtgagctcaatgtgaagtccagctcttggcttttgtctagcccatgttatcgctgcccctgtatggaagccccaggcatctgcagcagaattggaaacgcaaattctgggaccctacctttaggccccctaaagtagttgccccaagagctttttaaaaatttatttataatggagatgtgctaatggtattgcactaagtcttctaattgaagtctggttgctttttctgaggttttaaacttgtgtctgagatttcttgtttgtttctcaacatttttttttttgagacgggagtctcgttctgtcgcccaggctggagtgcagtggcacaatctcggctcactgcaacctccgcctcccgggttcacgccattctcctgcctcagcctcccgagtagctgggactacaggcgtgtgccaccatacctggccaattttttgtattttttagtaagacggggtttcaccgtgttagccaggatggtctcgatctcctgaccttgtgatccacccgcctcggcctcccaaagtgctgggattacaggcatgagccactgtgcctggcctcgtttcccaacatttttattgtgaaacacattaaacatattgcgatgttgagaggagttcacagtgaacactcgtatacccgctccctaaattttaccgaaacattttactatatttccatctctccatcttgcttcaggagcacctcaaattaaactgcagacatcagtacttcctgggggctttttttttttttttttgagacggagtctcactctgtcaccaaggctggagtgcagtggtgtgatgtcagctcactgcaacttccacctcctgggttcaggcgattctcatacctcagcctcctgtgtagctgggattacaggcatgtgccaccacacctaatttttgtatttttagtagagacggggtttcactatgttggccaggctggtcttgaaattcaggtgatccacccgccttggcctcccgaagtgctgggattataggcgtgagccaccacacctggcccccggggggctatttttaaagcacttttctaaagtacatggctgatctaggcaggcatcttggaaactactctgcgttgacttgggcattgtctatttcttcctctgctgccctcgccagaccctgcgggagattgtgattggcgtcctgcaccaattgaaaaaccagctttactgaccggttcttggaaacctggagaacagccaacaagaggcccttgaatctctacgtggccactgaactgctgggcccgggagactggactacaacacctcacactggtcagctggtttctacttggtgtttggtttttcccagccccattttatcttcagcggagccgcggtgtttgttttgtgaaagcttctgattaatttattatattgacgataaaactcaaacctacccagccttccccccactccatggaagtccttgggatgggcgtctgctctggacaccccaaagagctcctgccctctcagccctttattcaagcctcagatttctgctcatgatctacatagatttggaaactgttttcctctgttttggtctcttgggcaacatttttggcccaagtttgggcaacatttggcccaagtttgggcattttggcagtagctgtatgggagaaaaagagtaagaggaaatattcccacagccatgaagggtgaaagggcaccttgtgcctagactagggctgcctggtcagtcccaggtgaggccaagggctttctggccatctcagggaggggccaccaggttcctcccctcaccccatattccatcaccttcctcctctgctctgggtggtaagggaagccctcccggttcccacaggctatgatgctgcatggcagaggcaggtataacacagcactacatattggaaattttttatttttctaaataccaatgcagttttgctacggttacaattttgaaatattaactgagcctcaaaatcaccctttctgtcaagcatatcttggcctctcccatgtctcagtgttgcctgcatttctcccaggacttgggggtggggtgaaaagcgtacaaaagatacttaaaagggctcctggggtacacaagcccagcaggtcctgagtgaagccgtgggccctccaaatgctcgttttatagcaacctctctctaccctagttctccaaattcacttctgccttcctcaggtttgatatctggcaggtttgactatccagaggaaattaaatatttttatataaaattaaattataataaatattgccaaatgctttcctttagcattgttccaagtctaaatgttaacctcaagctactgcaatttagacaatgaaatgggctgggtctacccccagccaccagccctcatcctctctacccagtgctctggtttatgcttgtctcctgactgctctgcttaaaggtgaaagtagcaggaacaacaacaaaagccaaccaaaaacaaggtagccagtgcaagacatctcactcttctgacatcctgcagtccccaccagtcctgaccgtgggcccctcaggggtctgggagtgtgacgttgtaatcttcatccgtctctatcccaacttcctcctgtgagacagggagacaagtgaatgagatgtcaccaggataagaccacagggaagcaaagaaggaagagagctccacttacaaagaactgcttcttgctcttggggtatccttcaagtattgcatcagacagctctgtagcctgacaagaaataaaaccacccgttttcagatgggcagcactgggcactgcctgtcagtttatgatattgtgtagcggctgatctggtgcctgccattttcaaaggcacctccagggcctgtctcggagctcccacacacttaccatcctcttcctcttcctccactccttacagtacttctgcctctctctgtacacctagaaggaaaaagcaagttcctctaactcctcagaaccacagcagccctctggggctcagccctgatgttcactctggacctgcacagcggtcctacagccttccagctcacctgctctttctcttctggagtcacatgattggtagctgctttaatgttcttcaatctctctctgtagccagcgcattccttctttaactcctggatttctttctgcatctctggtgtggtcagggcactagataattccttgagctctgaaaccacatccgcctggggtcacttgctacccctgaggaaggagttctgtctttcccagtgggtgctccctgaggtgttccaccttgctctggatctatcatctcacatggaaactaagccatacaggattatttattcttctaattttctttcctcctccatctacaagtggcgtgggtgtgaggttgaacacttacttaggcgtagccagttaaagaagcaggaataaagggaaacgtggggacagtgtactgataatcgtggcagggagaacaaatgcgtatcttgtccatttgttggtacacaaaagccgttagttatcctacatttctttttatgcctaagggagcccagcaaaggggtcttagctgcaacaagatgctgcagtcattgaaccattcatttagtaattcctgacctctagaatgaacctaagcctatgggcactttggaggggctacccagtcctaccagcctccatgtagcggcagctctgctgcaagctctgcaccttagcagtgagggccacgattttgccatctaggacttgaaggtcagcatcactcaccatgtcaaactggtcctgccagacaaagagggaaaatacaagtgaactgttgtgaggcacaaagatgggaacacacacctgggaaggcaccatttggatatgctcaggaaccagccacaccccaaagtctccagagggtctgcagaaatagtgggagagtacttttgagaaattgttttcagttaaggagcggccccactaaaaaggtaggaaagaaaagctgaaatctaatgcttgtccttaagctactaggttgacaggatactgattaggacagaaatcttcccatttagtgataaaaccactacctgggctgaagcagttaagtaacattgttcccacggtggggaaacctagatcatgggtttccataatagatagaaactggacaggtgaagaagcatgatggatgggatggatggacttcttttcttcttccttcctgtcctttcttcccatccttctttccaccttcctctctccctccttccttccttcctttttcctccctccctccctccttccccctccctttccctctctctttctctctctttctccctcccttccctcttttcctctctttctttctctgtcacccaggccagagtgcagtggtgcaatcttggctgactgcaacctccgcctcctggcttcaagcgattctcatgcctcagcctcctaagtagctgggattacaggcgcgcaccaccaagcgcagctaatttttgtatttttagtagagaaggggtttcaccacgttgcccaggctggtctcaaactcctgggctcaagtgatccatccgcctcagcctcccaaagtgctgggattacatgcatgagccactatgctgggtcttgggatccatgtagataagggattccagtaagtctgaggagcttctctcatgaggggccattgctagaaaagaactgcactggggatcagtgtgggggtgggggaggtcacatcagttggtgatggggagcaggttgaaaaagtatgccagccagtgcagtctggactctacacttgggcaaggtgaacctatagggcagaggccagcaaactatggccagcaagccaaatcctgccagatgcatgtttttgaaaacaaaattttattgaaacagccccacccgttcatttacatagtctacagctgcttctgttctacagtggcagaggtgagtagttgtggcagttgtacagccagccatgacaagagatacatatggcccacaaatcctaaaaatactgtctggccatttgcagaaaaagtttgccaaaccctcctttagagaattatctttagatgagtaacacaatgcagcctgttttaggaaagtcagccttaaaagtggtttggttcagtttaacgagtaatatctgctggatgttagatactgcggaggtgctgatcagataaaaatgaattgagaaatggggtctgccctagaggaacttcagttgaataaaggagacaagtaaaaattgtaatacagcatgcctcaaaagaggtaagggccaggctgggcacagtggctcatgcctgtaatcccagcactttgggaggccgaggcgggtggatcacgaggtcaggagatcaagaccatcctggctaacacgatgaaaccccatctctactaaaaataccaaaaaaaaaaaaaaaaaaaaattaggcttcgtggcgggtgcctgtagtcccagctactctgggaggctgaggcgggggaatggcgtgaacccaggaggtggagcttatagtgagccgagattgtgccactgcactccagcctgggtgacagagcgagactccgtctcaacaacaacaacaacaacaataacaaaaagagataagggcctgaaaaagaaacaattagctcggagcattcaaggaagatttctggaaaaggtgatgtctaagtgaaatcctcaaggaaagaaagagctggccaggaagagaagcaggtacagggaagacaacatgcaaaggacagagcagtaaaacacaccagaattatctagtgttcgtggatagaaaaataatgaggattggtgaggccagaggctggctggggcgtcttccggtgccttttacatgttttttgcagcactagagagccattgaagagttttaaatagggaaggtgcatgaccagatctatttagacagatcattctgactgcaatgtttaagagtttaagatatgtttgaagagccaagatctgttaggaggatactgcaacaaataaagagggcgtgaactagagcaaccatggcagatggaaaggagagtggattcaagaatggaaaaattagccaggctctgtggttcacgcctgtcctcccagcactttgggaggccaagacaggaggatcacttgagcccaggagttgggaccaacctgggcagcacagtaagacccatctctataaaaattaaaaaaataaataaaaacggaaaaatcagctggacttgatggttgactagtaaaggaagtcaagaattgctcccaatttctggtttgggtgaagagtaattccattaggggaggagaatgttagaaagaaaccagtccggggtggggggaagatgaggcattctactgtggcaattttgactctgatattaatgcctgacagattccagctggaggtctgggctggagaatataaatttgatatgtgtgtttagagaatcggatggaggcaggaggaacatcatttggcagagggtgttgctaatgtagatgataaggaataagagctttggagcggaaatggatcttggtagcaacaatacagaatcttctgtcatccatcatattgtaaatctggaaacctcgtgaagttgggatcctaacaagaggagtacacaccttgatttaaggatggtggcctaagacaggtgagttttccatggggggccttgtccccaaagagttcacaccaggagtagattcacccgttgtcgggctctcatgggtgacaatcggcgcaagttctcctcacctgatccgcaaaatagatcttctgcttgccgtacatcttctctttgatcttgccttgttgcgccagctgctccagcgtcttcaccaccacctggcagaggagagagaaggagcaatcagaggagtctgagcctgggtctggggaaatccagccagtgatgtggaaaacgcccaaggctccaaagggcacgaccccagcctgaatccagggagtccgacggagagggaatcccgggagaaggtcctcaccgccttgcccagtccgtgttcccgctgtaggttcccgaacacatcctgggagctgtagggccggttctgctcctgcaggtacctcaggaggatcccggcggctacggagagaaaggcaggggagggggccactcaaccgacctcctcacccactgccctcccgggtcttccccgcgcccacggcgccgttacctcccgccgcagcttctgcccggcctttactcatcgcctttcccgccacccaactcagaaagccggacgttgtagttgctcggggcgacggctccttccggcgacgggggcgggcctcgaacggtgattggctgaaggggaagccttccggaggagcaaagcgacccctcccggactccatagttcatttcaggtcggaacttgcgcattcgggccggacctcaagccatgggcctctgcgaaggcgccggcgtgcccacggctaagaaacttcctctttctgctcccgggaacgaaggctgtagcagagaaggccttcaagtttcgagacccagttccagccgcagctgagcactggtgaccttgaattaagtctaatgttgggattggaagacgcttcagacatccgctgccgccctgggcaagcgaccagctcaaggttaccccacagggacgtgctctggtcccacggtccagtgctcttttgtcggttagttttgtcatttgtaaaataggaacagtagatagtggtaggaaagtggttgtgaaaacttaatagaaagctaagcgccttggtcgggcgcagtggcatgtcacccctgcaattctatcactttgggaggctgaggcgggcggatcgtttgagcccaggaattcgaaaccagtctgggcaatatgaaaccccatctctgcaaataaagtacaaaaaattaagagtggtggcgcgcttctgtggtcccagctactctggaggctgaggtgggagggtcaccagagccccggacatcgaggctgcagtgagccactatgagcgcgccactgcaccccatcctggcgacagagcgagacgcagtctcgaacaaaaaaaaaaaaagtgggaaggggggacagctaagcgccttggagagcaaccacccttatttgcctaataccgagcttcgcacccagggggcactcgacacctactgtagtttggacgccaaggaacgatagggttaggagggggctactgttcaaccacaaagcttgtggaaaagtttgttagcccagacaatctcagggcaacacctggcaggtgctttccacccctgaccacagtggccaatgggacagagcctgaaataaatatttctagtttctgaggtgagctgaaggccaaagagcagctgtccctgcagctcagaccatccagtgaaggagtaaggtgctactttttaaagccttctgctacctacaacctccttagcctttaaaacgtgtgcttgtctctgcacgtttaggagacaatattaagaattagaaatgaaagggccgagcgcggtggctcacgcctgcaatcccagcactttgggaggccagggcgggcggatcacgaggtcaggagatcgagaccatcctggctaacactgtgaaaccccatctctactaaaaatacaaaaaattagccaggcgtgctggtgggcgcctgtagtccaagctactcaggaggctgaggcaggagaatggcgtgaacccgggaggcggagcttgcagtgagagatcgcaccactgcactccagcctgggcgacagaccaagactccgtctcaggaaaaaaaaagaaattagaaatgaaggaaatacaggctaaatactagccaagagtgccagttatactgatggtggggctctcacaagaaggaaagtagcctcatactatggtgatgttctggccatcacgaagtaaaaataggggtgggctggtgggtccctcatacctgggcttcctcttttaaggctatcacttcaaattaatcagaactcagatttacaagagaagacctatcaagggtaggacaccattcagcatcagtctcttaaagattgttctcatacaagatttattccccagcacacccctcccctcctcagttcacagtggagactatggagattcagggcaggatccctcaggtacaagaaacaccttccgaagattttgctctccttccttccctccctcttgccaactcccaaggcctgaagcgcacactcatgcaaacacacgaaatccccctccttccccacacctcctgtctttccacatcagagctctgaacttgagaggtgtcaaaagtctgtttgagaagcctaaagtggggagatgccattacccctgaccaccccactatgagtgactatgagacacctaactcttccctcttctgtcaaccattttcactccctggcctctgtaccttctccatcaaccaagagcaaacatgtcagcacacccccacctgcagtacatgaaaacaggctctgtccaacatccctcacccaagtacaggggtgttgggggagtggcccctgaggatcagcaaagggttaatgcagaaggaaagaggacagaagcgtttggcttgagctctgcttggggaggcagaggctatagactggcacaggtttagaatcaagtaccatgtttaggtttctgtctcacatcacatgatttcactaggggctgcagaacagatacccctcagaggggtctctgctgattacagccacattcttactattggctcatccttaaaggaggccccaccaagttgggaagcagttgaaaataaaagctgtaaaggagctgaacaggaagtaagaataggtggtgcaagagattatggcccctgggatgaatgacatggagccatttgtaaagtgctactgtatcatcccccatgaattattgcttctccaaaggaggagcagaggaaggaacaggaacatagaaatgagtatggtattgctttgctcactgctgaggctgatggccagatggacccaggggttatcagaaaccgaagattaactacacagctccagaagactcagacctcaaaatacagaggtgctcactaatcctcccagccagctgatccccctgggccaaggtaatgtagaagaggcccatccccacatcatattcacattttttaaatttcacaagcaatactttggaccactggggttcaggccccaagaaatgatgggctagatgagagggagcaggcctgttctgcaaaaccaaaggacaagtttgctttaaaaaaaaaaaaaaatcacgctgggcacagtggctcacacctgtaatcccaacactttgggtggctgaggcgggctgatcatttgcagtcaggagttctagaccagcctggccagcacggtgaaaccccatctctactaaaaacacaaaaaaattagccgggcatggtggtgcatgcctgtaatctcagctactgaggaggctgaggtaggagaatcgcttgacccggcaggcggaggctgcagtgagccgagattgtgccactgcactccagcctgggcaacagagagagactctgtctcaaaaaaaaaaaaaagaaaagaaaagaaaagaaaaaaatcaaatcctggtttaacaaaagatgacgactaatcccagcactctgggaggccaaggcagtcagctcacttgaggtcaggagtttgagaccagcctggccaacatggtgaaaccccatttctactaaaaataccaaaagaaaaattagccgggcatagtagcgggcacctgtaatcccactactaaggaggctgaggcaggagaacctcttcaacctggaaggcagacgttgcagaaagccaagatcacaccactgcactccagcctgggcaacagagcgaaactgtctcaaaaaaaaagatgatgacaatgtaactactccagctgctgcctgactttgggggctctagagaggcgatgaaaggaggaaggcaggcatgggctctttcagtgagggcccctgagcactcatacctaaaagcaaacagcagcacctcctcaaaggggaaccaatatccctgactattttgttcccccaaagtaccatcctgatggagagaagcctcccttgggggagcacactctcacttcagtgactgagctcagaaatgggcatccagctggtgggaggggagtgagtgtcctctctaaggaggcctctgagcatcagccaggccacccagcatacaaatataattcaggggaggggagctgagttcttcccttgccccatcaccttaagtgggatggggagaaaaaaacctaaaccacagtgactcccaaaaggagtctctgcctcagtggctcctagaactggcagggtccagctgactcagctccgactggtccagaagttcaaagtcatccccctcagcatcagtgtccaggtctgaactgggggaccggaggaagcctctcgttgctctctgggcaggtgctccagaagggcctggttgggaggcccctgacaaggccagctgaatcataccctgggagaccaggctggcaaggttgctggtgaggttggatcctacaggaagagcaccaagcaggagctccggcagcgcagcctcgtcccggctggcaggtggggcctggggctcctcagcccctggcggagaacggtacatcaagctgggcatgccaatgctagtgtcgtcctcatcatccaggccagcaggatccatattaatggaagggaagtctggaaggtctctggcaaaggattcctctggatcactgtgaccatctaggtctggtggaatacagaagtgtctgagtcatggcacctacctggccctcctgtgccccagccccacatgaccagatttttcccaccctggctttctcagggcgaaataaacccatgggactggtatacctttcccctccacttataggtggctgtgatctctacacaattccccctctcttctatgtcccctgtgaggctagtgcctgaggctactaagggactaaagtcttcaagaagggcagcagtgccatcctggctgtagccacagcactcaggctgctctgccgcctgatccatagctcagaaaacaggagaggggcaagcaccagtatcccctctgttcagggaagctaagaggcaacagtcagagccattatcaactgaggtcaaaggctcccctcaccttcagagccttccgttagaggtgtttggccccttgaaagattgaatgtgccattgtctgtacaggagacttcagcgtctgagtgctcagagtctgtgatggccaattccctggcaacagtagaatcgtccagcttaggaaaagaccaacaaatgtgagataatgccatcaggaaccaggtgtagtcaccaggtacagctttactaatcagctagcattagttatccgaaggccatcaaatcaatgtaaccagggatagatggtaacttcccgttgaaaactccctctcccctttattttttttttaatcaatacatgtgaaagtaacaacaacaaaaaaaatcttgaccccttttaggctgctctcccaaagaaaacactcattcataacctcttaagcacaggaagaaaagcagtcttgggggagtcaattacccacttactttaaggcaaataattgatccagagataatttttcaaagtggtaggaggatacacatactgcacagacccaagggtgaactgggctgtttaaaagatgatcatactagctccagaagttcttccataatggtagggtaaaaagagatacggaagagcggtgctgggcatcaggctctaattgagacctaggttgattacaggaatgatatgataaagaaaaaaattgagatctaggaacaaagtctcacttctctccttgtcttgggaacaaggggagtctaaggcctcaaacctggttatggcctaaatgtgagctgtcggatggttaaaaggtagctaaagaaaactggacagtgaagcagctcccacactcaagatacctgaggacagaaggcagcaagctcctcttcgctgtcactgtggttgtccatggctcgttctgggtggagagctctgcggcgtactgtgggaagagcacaaagtcttgcttgataccttctcccagcgtaaaatcccctttggactttaaagacataaaatcagaacacaaaacaaagagcctctctgaatctggctctaagcctacataataataacagaaggctgagctgctgagcctaaatgcaaggtgagttgaaaacactggagaaaatatctcagcttccaacatcctctccaccagaccctacatatttcttttttcttttgagatggagttttgttcttgttgcccaggctggagtgcaatggcgcgatctcggctcactgcaacctctgcctcttggattcaagcaatactcctgtctcagcctcctgagtagctgagattacaggtgctcaccatcacacctggctaatatttgtatttttagtagagacggggtttcatcatattggtcaagctggtctcgaactcctgacctaaggtgatccgcccacctcagcctccaaaagtgctgggattacaagtgtgagccactgcgcccggcctggcacacatttctattctggtcagatgatcaaataccaggctttgtcaacaactctctggatggctaaaggcagacctaatgtcaaggtgttaagtggacatgatcaaagagagggcaaaaggagatgcacaccttgttaaatcagacttttgaggactggtattattcaactggctgccccaaggggacttgggccttggtgaccaagtgcagggctctttgaaggccaggcctccataaaacacaaaacctgacaagaccacacaagggagggaaaagtttgtactaccatcattgtgttgcatggatctcaggctagtacacttacaacctctgaggcagcagtttttaatcacctttgggaggcagcttttactagtgaagagaccaggcttaggagttgaaaggatctgctctgggctcagcacggtggctcacacctgtaatcccaacactttggaacgccaaggcaggaggatcgcttgagcccaggagttcaggatcagcctgggcaacatgagaccccatctctacaaaaaaatttaaaaatcagatagatgtggtgacacatgcctgtagtcccagctactgaagggtttggcggggctgagtagaaggatcacttgagcctgggaggtcaagggtgcagtgagccatgatcatgccactgcactccagcctgggaaacagaatgagaccctgtctcaaaaaaaaaaaaaaaaaaaaaacaaaccacaaatactaggaatttatcttcactgtctagcttttattcaacttgaaagagcttttatcagataggtttaaaacgggagcctaggattacaaatgataaaaactggcaagcctgcacaggtttccctagaacagaatatcatttttacctatcaatcctcacccccaccaactacccccgacttccacttttgaggacccacccagtatgtcagacctatgggcttctccttttcgccccaaattgcgtaagtggaaagaatgacaccatgacacttacattgtctctctctctgcttggacatcatgtagccacggacactgaagtctagccgctgcagagctggcttcagccgcacatatgctcgatcccacagtcggtggtacacagcaaggggccacatcatgacagtgacaactgtgaggaggcatgggaaacagtgacaaaatggagaaggggctgcaaaaaacattcccaactgtagcgctgctattggtccttagggcttggacacaaagtgtggaacagatctgcccaagtctgccagtcatcttcaccagtctcccctacacatgaaggagtctttgagggcagggacttctacagccacccacaaagcctactgcagggttgtgcacagcacagtatgctgctgacaggccaagggcagaacctggcaatgggtgtcactgagccataaatggaaattacacaacaaatcatgcgaggttttgatatacaaaagccacaggcataagtacttagttcttccagccccaagcaagctgagtacatgccaacaggaagtaactaaatttacaaaactatgctccaagtgggaaaaaagtactctggcataaatagaacctagcagagaaacccctaagagttatgttctgctgacaataccctggctctaaaaattctctccttaaacagggacaggcagtcctttatagttggtaataccaacaatatatgttagtggaccctcatcaatttctgacttggtaagaaatgaactttgtatgtggagagcctgctaaagaaggatattttcatgacactaaacaggtcatgaaaatatgcaaaggtcatatcctagagaattgaaatataacagtcctctccccacacctagagttagccatagttggaaagctatgagcagggtatactttgtaggggaggtatatgtcatacttacgcatcaagtaggacagcagaagcccagggacgtagcggcccaagacagccaaaaaggtcagtatcccacagctcagcaagcagaactggggaatcaagaaagagtattaagtttctgtcacatggcaggggactggggtgggtgtgaagggttagggtagagatatgacagaaagactctgtaagtcaagcatggacgtgcagccactgttgcatccaaaggtgattctgtttgggaagaaaaggagcatgtccccttctattcaaactccttttacatggctaaccccatagggctgcacctttcctgccaagaaattggtttgaataggacttagccaaaaattctctctgaaagcaatgttggtggtggttttttaagtcaacagaaacacacacaaaacccaaaaaaacacaacaacctatcacatatttaatatgacacagaatgtacacaagaaagctttctttcctatcttgaagcaagaaaacggcctcatctaagtggcaaccacaccaaatgagcagtcaccaagctcctgtgttagtcctaatggctggtcagaaggcctttcctatagcttccttttgtctctatgaacatcatagtctttactttcttgaatgaagacacatagtaaaggagctgtttcagtttagcatgaactgaactgagaggccagagatgaaagtgaaaaagggaagagtcttaccttgcctgggttttgctttttgaaaagcaaaacattccttatgaaaatggtcccactaacccagacttcagctacatggtggcagagctcgggcacgctgagcaaccgagggtgcacaaagccccagctatgggagagagaagggggagctgtgaaaggagggtgttgagggtccccccatcttgctgtgcaggcagccagtgcttccggttttaaatggggtttggggagtgactaggcccaggtgctttggaggtgaagcatgactttcttcttggctcaccaggttgaaatctgaatttaggtacaaggaggacaaacttgttctgacaactccaccctatgagcaagcagcccaatccacgtgtgtaaacctgtccccagctccaaggccctttgtgcttagaaacgttttcttccttgcactcagaccattccaattccctgtgattgcaatccagggataaaagtgagcatagtctgactgacaccactgctgctaagggggaggaaatggtggatgtgccccttagaaagaaaataaataaagcaaaaccaaaataaaccacagcagagaaaattctttggatcaaacaaatggagtggatgaactgagaaatgaaagcaggagctgtaagacacaagaggaatctttggctttgacttgctgatgccaggaaccaatgtgttttctgaccgggaactttaaatagccagaggtcacagaaaacactaaatgacctggtataaaagccaggagacaaatgaagttagctgcctttaagttttctcactgggactgaataatgcagctgattccctggcatgtcaggttatggggcactgtaatgcttctttttcagaaacttctcttgtaaagatcagaggacacaggccatctcaacatattgctgcctgaactttaggatgtgttaaaatgatcatttggaacagcctaggttctcagtttacactgtgtgtccagaacatggggttaacaacatgtaaccagaatattacaagagaatgaatcagagcaacaaaaagggatttaattagtgttccatacctctcattgtctaatgcgtcgggtcttggcactacaatattaaaacaaacaccagcattagttggtagggaaaactaaacatgaaaatgttaggctgttggtctgacagctcaagttttaataggttggggaaaagaaaacagtaatagccgataaaaaaggagacactgtgttatactgccagttagggagctgcagacaagggaataatcacttatgcctactcatttttcgaggggaaggaagggaggtccaaatggactatttgagcccccttctaatgacctcagctgaaagccaaggtgtacaagaaaaatggtccatctcaccccttgagtgtgtctgggatacccatacacatcaatctgtgccaggctacacaaggtacgttgtaacaactccaaccctagaaatccacctgttgtgtttattttttttgagacagagtcttctcgctctgttgcccagcctggagtgcagtggcacgatcttggctcactgcaagctccgcctcccattcttctgcctcagcctcctgagtagctgggactacaggcacccaccacaatgcccggctaattttttttttttttggagacagggtcttgctctgtagcccaggctggagtgcagtggcgtgatctcagctcactcagcctcccgagtaactgggattacaggcacacgccaccatacctggctaatttttgtgtttttagtagagatggggtttcaccatgttggccaggctgctctcgaactcctccacctcccaaagtgctggcatcacaggcgtgagctaccgtacccagccgaaatctgcctgttctctttatttttttgagacagaatctcactctgtcacccaggctggaatgcagtggcacgatcttggctcactacaacctccacctctggtgttcaagcaattctcctgcctcagcctcccaagtagctgggattataggcacctgccaccacgcctggctatttttgtgtttttagtagagacaggtttttgctatgttggccaggctggtcttgaactcctgacttcaggtgatccacccaccatagcctccctaaagtgctggaattacaggtgtgagccaccacacccagcctgcctgttctctttaaaaagagacccagagctaggtgtagtgatgctcacttatagttctgcctccttggggggctgaggcaggaggatcacttgagcccaggagttcaagtccatcctgggaaacacagtgagaccctgtctctaaccaaaaaaaaaaaaaaatggggagacccattatctacctgaatgatgtataagtcttttgagattcaccagccattagataggcagatgaactacacgattccttgaagtctctataaaatatgatgggcatgtatttaaaacctgtatactctggtttgaatatcttgccaacacttcaaaattaacctgcctaaaatctacatcagttttcctctctcaccccttcaaaccaactttcctgtctgcctttgcctgctaagtgtaatgccattctgccactctcttagctttaacccccatccacttatgtcttttattatacatatataacaattattattttctgagacaggtgtcgccctgttgtcttggctggagtacagtggtgcgatcacggctcactgcagcctcaacctccagggctcaagggatcttcccacttcagcctcccaagtagctggggaccacaggtgcacaccaccatgcctgggtaatttttttattttttgtagagacaaggtttcgccacgttgtccaggccggtctcaaattccttggctcaagcaattctcctgccttggcctcccaaagtgctgagatcacaggcatgatccactgcacctggccccaactatttatgtcttgatcttccttattcacagctctccaggccatccatcatttgtattcactgaggcctctctgactacttctcacaaagacactgccacagtctcctaacaggtcatcctgttccacttttcctccttccatgtggtcctaaaaatgctactaaattaatctttattatcggctgggcgtggtggcccacgcaggtaatcccagcactttggaaggccaaggcacgcggatcacttgaggtcaggagttcaagaccagcctggccaacatggcgaaaccccatttctactaaaaataccaaaaaaattagctgggcgtagtggtgcacgcctgtcgtcccagctactcaggagactgaggcaggagaatcatctgaacctgggaggtggaggttgcagcgagccaagatcgcgccactgcactccagcctgagcaacaaagtgagattctgtctcaaaaaaaattttttttacttagctgggtgtggtggtatgcacctgtagtcccagctaattgggagactgaggtgggaggatcacttaagcccagggatttgaggttgcagtgagctatgatcatgccactgtactccaaaacctggacaacacagtgagacctagtttgttaaaaaataagaatagggctgggcgcggtgactcacgtctgtaatcccagtactttggaaggctgaggcgggcagatcatctgaggttgggagttcaagaccagcctgaccaacatggagaaaccccatctatagaaaaaatacaaaaattagctggacatggtggcaagtgcctatagtcccagctgctcaggtggctaaggtgggagaattgctggagcccggaaggttgaggccacagtgagccatgattgcgccactgcactccagcctgggtgacagaccaagactctgtctgaaaaaaaagaatgcgccaggtgcggtgcctcacgcctgtaatcccagcactttgggaggcctaggcgggtggatcacctgaggtcagaagttcgagaccagcctggccaacatggtaaaaccccgtctctaacaaaaatacaaaaattagccaggcatggtggtgcgtgcctgtaatcccagctactagcagggctgaagcaggaggatcacttgaacctgggaggcggaggttgcagtgagccaagatcatgccactgcagtccagcctggccaacagagtgagactccgtctcaaaagaaaagaaaagaaaagaaaccaacaaaaaacctaatcccaacatactttcagttttatttcctagcactccctttaatgaaccttcatcctggccatatgatcaattctctgatgtcaggaaatgctttgcaacttctggttcctcagactaatcaagccactggactctctagaaacagacttttttctcaatctgttcaaatcttttgctttgttccactctcaggctagggaaaaaatacatgctaagtatactaatcacatactgcactgtgacatctgtggtgctggtctataattgtcacttaatttttcatttgtttatgtatgtattagctttttaaaaagacaccacatgtcatggtactttctttttttttttttttgagactgagttttgctcttgtcaccgaggctggagtgcagtggcacgatctcggctcactgcaacctccgcctcccaggttcaagtgattctcctgcctcagcctccttagtggctgagattacaggtatgcatcaccatgcccagctaattttttgtatttttattagacggggtttcatcatgttggccaggctgggctcgaactcctgacctcaggtgatccacccgcctcggactcccaaagtgcaggggttactaataggcgttagccactgcgcccggccatcatggtactttctataagtcacaattgcctagcctagtgttttgcaaatgagcaatgtaaaaggaattcctgagaggtactgcctcaataaagatgcagtgtccaataacgataatttattatttttcatttgaggactacttattcctcaggccattatgttggcaaaaataactcaggtggtgagtacagatttcctgtgcttagtaacaatgggaagggcagaacccagctctaaggaaccataattggggcacaagcccttcaagtgcctcctaaagcaaatgattcagacttcaaaagacagtccccagctccatacacctcctcataaacccctaatactaaaggtacaaattataggaaaggccatcttcagttcagattgttctaaatgctaccaaactcaccttttatttcaggccagattttgttcttccattgatcaatacacacaatgatcatcaagccaaatgcaagtaaaaacacaagacgaagagatgtcagggcaaaaaacctacagaggaagaaaaacagaagaaagatcatttacctagttatcctaatttcagaaaaggccacgtgtgtacgatgggctctgtggtaaacagacttgaggtctagctttttttgttctgacacttaactagttatacacctagggtaaatcatttaaaccttctggaccttaactactctacctatggggcagagaaaataatttgctgctgtaaaggcagaggactaaatcaaataacctcttaaagctccttctgctttccagtctatatctctattaatttcacggagaaattcatccttgataacaagttgttataatgaaagcaaacatctttctaccaaattagaccctagtgtagggcaacaaactgacagagatgcactcaagagcatttaattcaattacatatctttttacagatctaggaactgaggcctgaaaaatatttgattaaggtcacacagaaagttggcataaaagctatattgaaaagcaagttctggccaggcacagtggctcaagcctgtaatcccagcactttgggaggctgagacaggtggatcacctgaggtcgggagtttgaggccagcctggccaacatggtgaaactccgtatctaccaaaaatacaaaaattagccgggtgtggtggtgtgcacctgtaatcccagctacctgggaggctgaggcatgcctgtaatcccaactacctgggaggctgaagcacgagaattgctagaacccaagaggcggaggttacagtgagccaagatcatgccactgcactccagcctgggcaacagagtgagactctgtctcaaaataaataaataaataaaagcaagttctccagaattaacacaaatgcttctcaaactcttccaaaaaaccaaaaaaaggaaacacttcttgatttattttgtgaggccagcattatcctgataccaaagccaaagacacaataaaactgtagaccaatattccttatgaatatagatgtaaaaatcttcaataaaatactagcaagttaaattcagcagcatattaaaagtattatacaccatgaacaaatgagatttatcccaagactgcaagggcggtttaacatacaaaaaaatcagtaagtgtaaggcatcacatcaataaggtaaaggaaaagctagttcttatttgaaggaatcaaccataaaaaaattttgaggccaggcgtggtggttcaagcctgtaatcccagcactttgggaggcagaggcgggcagatcttgaggtcaggagatcgagaccatcctggttaatatggtgaaaccctgtctctactaaaaatacaaaaaaattagctgggcatggtggcgggcgcctgtagtcccagctgctcgggaggctgagacgagaatggcgtgaacctgggaggcggagcttgcagtgagccaagatcgcgccactgcactccagcctgggcgacagagcaagactccgtctcaaaaaaaaaaaaaaaaaaaaaaattgaacaatctgagaaatctgacattgagaacacatctaatgatactaaggaatttttttcttttagatgctaagtgttaaggtagttatttttttcagatctattttggtttaatattaaatgaggaaattcagaaacacagattagtacagatagcataaatgctacactctgggtcattttttcccttttttccccctaagtaacatgtgatgtgaacatgaactatagagccctggccaggtgtggtggctcatgcctgtaatcccagcactttgggaggctgaggcaggcagactgcttgagctcaggagctcgagacaagcctcggcaacatggggaaacaccatctctaaaaacaaatacaaaaaatgagctgagcatggtggcgcgcttgcggtcccagttacctgggggactgcgtcacaagaattgctagcctcggaggtagaggttgcagtgagcggagatcgcaccactgcacctccagcctgggtaacggagtgagattctggtctcaaaaaaacaaatattggagccaatatgaaaatcatgtatagattagaacagaatataaatagcatttcacagtattccgaaaagactaggcatggtggctgacgcctgtaattccaacactttgggaggccaaggtgggcagatcacctgaggttaggagttcaaaaccagcctggacaacatggcgaaaccctgtctctactaaaagtacaaaaattagccaggtgcagtggcgtgcctgtagtcccagctactcgggagggtgaggcaggagaatcgcctgaacctgggaggtggaggttgcagtgagctgagatcgcgccactgtactccagactgggagacaaagcaagactccatttcaaaataaaggctgggcgcggtggctcacgcctgtaatcccagcactttgagaggctgaggcgggcagatcacgaggtcaggagatcgagaccatcctggctaactcgttgaaaccctatctctactaaaaatacaaaaaataaaaaaattagccgggcatggtggcaggtgcctgtagtcccagctactcgggaggctgaggcaggagaatggcgtgaacctgcgaggcggagcttgcagtgagctgagattgcgctactgcactccaggctgggcgacagagtggaactccgtctcaaaataaatacatacatacatacgtttatccggctgtacatttgaatatacatacataaatgggggactggcctaaggaactttacgttttgtttgtagatttttttttttacttttttttttttttttttttgagacggagtttcactcttgttgcccaggctggagtgcaatggcgcgatcttggctcactgcaacctccaccttctggttgaagcgattctcctgcctcagcctcccgagtagctgggactacatgcatgcaccaccacgtccagctaattttttttgtatttttagtagagacggggtttcaccatgttggccaggatggtctcgatctcttgacctcgtgatctgcctgcctcagcctcccaaagtgctgggattacaggcatgagccactgcgcctggccttttgtactttttttttgagacggaattttttgagacaccatattggctaggctggtcttgaactccctgacctcgtgatcctaccttggcctcccaaagtgctgggattacagacatgagccaccgcactctggcccttttttttttcttcagagtcttgctcttgtgacccaggctggagtgcagtggcacgatctcagttcactgcaacctctgcctcccaggttcaagcaattctcctgcctcagcctcccaagtagctgggattacaggtgtgaggcatgacacctggccataatttttaaaaataacattttaaaatcatacaaagaatgagggatggacgggaacaagaactcagaaatccagtcaccaatgacaaccctatttctttctttcttttttttttttttttttgagacggagtctctctcttggtcgcccaggctggagtgcaatggcatgatctccgctcactgaaacctccacctcccagattcaagagattgattctccctgcctcagcgcgctgaggcaggaggattggttggttaagtccaggaggttgaggcagcagtgaacgtgttcacgccactgcaccccaggctgggaaacagggcaaggccctgtctaagaaaaaaaaaaaatcattaagaaaaaatagattgtgagcctacagtaggtagaaggagtaacaggctatcacagtccccaaactgaataattcatgtgtgaatttccagagttgactatatttgcagttgtttttgccaagttggaaagttctcacgctcattatcgttgccgaaaaatgttttcagccgggtgcaatggcttacacctataatcccaacactttgggaggctgaggtgggaggatggcttgagcccaggagttcgagaccagcctggacaatatagtgagaccctgtctctatttaaaaaaaaaaaaaaattagccaggtatggtgatgcaaacctgtagtctcagctactcaggaggcttgcttgagcctgaaaggttgaggccccagtgagccgtggttgtgccactgcactccagcctggctgacaaatctgagaccctttctcaaaaaaaaaaaaaaaaaaaaaaaaaaaaaaaaaaaaaaaagaaataaaaatgttttagtttttttcttattacactgttttatctgcttgtgagttttttggcccgcatgaatagacattgcaggactaaacgaatgcagaggaatcctccctttttttcctccattccttacccataccatctctaaagtacttcatcttcaattacatcttgtccatccacatagttgcaaagcttgttttaccgcttgacttctaggttacatctctaaaatgacaagtataatgtgaccttattatatacaaaatacatcaatctgatgttgatactcccttttatttaggaattttgtgttgagggctggaaggaaaggagaagcacacacttatctataccattttatatttgataaacctgtaagagaacattaatattaattacctggttaccttggaggggtcaactctagttctttgaggtgatctgtctattaagttttgctgtttggaagaattttttttttttttttgagataagagtctggctttgtcacccaggctgaagtgcaatggcgccatcttggctcactgcaacctctgcctcctgggttcaagcaattctcctgtcctagtctcccaagtaactgagattacaggtgccctcaccatgcccagctaatttttaaattttttaaatagagacaaggtttcaccatgttggctaggctggtctcaaactcctgatctcaagtgatccgcccgcttcgacctcccaaagtactgggattagaggcatgagccgctgtacctggccagaagaatctattttttctttttttttttttttgagacggagtcttagctctgtcgccaggctagagtgcagtggcgtgatcttggctcactgcaacctctgcctcccaggttcaagcaattctcctgcctcagcctcctgagtagctgggattacaggcatgcaccgctacgcccagctaatttttgtatttttagtagagacggggttgcaccatgttagccaggatgatctcgatctcctgaccttgtgatccacccacctcggcatcccaaagtgctgggattacaggaatgagccaccgcgcccagccagaatctattttgtgtgtgtgtgtgtgtgtgtgtgtgtatatatatatatatatatttcgtatatatatttttgtgtatatatatattttgtgtgtatatatatatatatatatatatatatatatatatatattttttttttttttttttttttttttttgagacagagtctcactctgtcacccaggctagagtgcagtggcacagatctccactcacttcaacctccgcctccagggttcaagtaatactcctgcctcagcctcctgagtagctggggttaaggtgtgcgccactgcgcccagctaatttttgtatttttagtagagacggagtttcgtcttgttggccaggctggtctcgaatccctgatctcaagtgatcagctcgcctcagcctcccaaaatgttgggattacaggcataagccaccgcgcctggccaagaaacgttattttataccacaaagaaaactcttcttcctctgaagtttttttttttttttttttttttgagacggagtctcgctctgttgcccaggctggagtacagtggtgcgatctcggctcactgcaagctccatctctcgggttcatgccattctcctgcctcagcctcccgagtagctgggactacaggcgcccgccaccacgcccggctaattttttgtatttttagtagagacggggttttaccatgttagctaggattgtctcgatctcctgacctcatgatccacccgcctcagcctcccaaagtgctgggattacagacgtgagccaccgcacccggcctcttcctctgaagttattattgtggcttgttccaaaaaaagataaatctgggactaaaattgatttatggacaaggattaatcttgttatggaagatgctcacaattttagccttcaagacccagaaaatataccctttatgaaactattggcttatcttcatctgcaggatgaaatcccattaccccgtcataaaagggccttcatgatctggatcctgcctctctccccacactgattccctccctttgttttttatatttcagttttatcaaactacttgcaattccttaagtatcttactagattggtgttttccctatctgaatgtcttctctctcttaccacacctttcggccccatttccttaacatttatcttgcaaatcacagcttagatatcttcctgtttgttattattacctgtcacgttatatcgtgaacacaaacacacatgaatttacttgagagtaaagtttgtgtcttatttttttctgtaactgggcttcttaccacaaggccttggcatgtaacaggtactcaaaggtatgttgaattgaattgaagcatagcttataagaatggaaggtaagggctgtaacaagcaatttaaatagtccaggtcttagaaaacagtcttttttttttaatgtttaccagtttattataagggatatgtttttattgccatcatctctggaaaaccaaccttcttaggagagcttaatatcctttccctaccctagtttctatttgtgttagtaatcgtgctctgggaaggggaaattgccaacagtctggcaagcctccctagagagccctttcaagtactctggagaaaacagcgatgccatgtgctgctgctggggaagggaagcagcagcactggggagcaagaaaccctagagctcttctccttggccttgttaaatgtgcttgtttgttgggatgatgcactggctttagagagaagatcaatggcctgaggcagctctagaggcttatttctgttaaactgcttttattctttaatcttacatatagtcacagtatcctttaggtggtaggctggaaaaattgaaatagggttgttggctgggcacagtggctcatgcctataatcccagcactttgggagccttaggtgggtggataacctgagatcgggagtttgagaccagcctagctaacatggagaaactccatgtctattaaaaatacaaaattagccgggcgtggtggtgtatgcctgtaatctcagctactcaggaggctgaggcaggacaatcgcttgaacccaggaggcagaggttgcagtgagctgagattgtgccattgcattccagcctgggtgacagagtaaggctccgtctcaaaaaaaaaaaaaaaaaattatacaactaacatgaattcatgtttatcgaaaaaaaagtacaggcatggtggctcacgtctgtaatcccagcactttgggaagccaaggcaggtggatcacctgaggtcaggagttcgagacaagcctggccaacatggcgaaaccccgtctctactaaaaatacaaaaaattagctgggcatagtggcgggcacctgtaatcccagctactcaacaggctgaggtgggatgacagcttgagtccgggaaactgaggttgcagcgagccgttatcgtgccactgtaccccagcctgggtgacagagcgagaccctatctcaaaaaacaaaaaagcaaaacagaaaaaaccacctaaacactaacaaattggtttgtggggaaaaaaagagtttaaaaaaaaaacaacaaataaaaccacacacaacaggccacatgtggtacctaaagcctgtaatcccaatactttgggaggccgaggcaggaggatcacttgagtcaaagagtttgagaccagcttaggcaacacagcaagacctcatctctactgaaaagaaaaacattagctaggtgtggtggtgcacgcttgtactcccatttacttgggaagctgaggtgggaggattgctagagccagaaggttgaggttgcagtgagctctgattgtgccactgcactccagcttgggagacagagcaagaccctgtctcgaaaagaaaaaaaaaagtatcatttatgacatttataagaaaattggaaatgtgaacactgactagaatcattaattttttgcatgtgataatgatggcagatgtttcttaaagtctctttttcagaaaaatatactgaaatacctagattaaatgatatgacacatcaataatttgtgtcaaacaataaggaagacgtagaaaagaactggggtatggaagacacaaaattggccaggaattgaaaaaaataatattatgtacatggtggcacacaatattattctgcctacttacacatgttttaagctttccataataaaatatttttaaaatgatccattatccacatatgtactctaaaaagtgtgaagacaggctattctcttcattaaaaaattcacatataaaaacactatggttttaaaactttttcacataatacatagacaattagcctgatgtggtgatgaactcctgtggtctcatcagccatgaggtggaatgatcacttgagctcaggagttccagggtacagtgagccatgatcacaccactgcaatctagcctgggtgacagagtgaaaccttctctcaaaaaaaacaatgaatgggccaggcgcagtggctcaaacctgtaattccagcactttgggaggctgaagcaggtagatcacttgacatcaggagttcaagaccagcctggccaacatggtgaaaccccatctctacctaaaaatacaaaaattagctaggcatggtggcgggtgcccgtaatcccagctactcaggaggctgaggcaggagaactgcttgaatccgggaggcggaggttgcagtgagctgagattgtgccactgcactccagcctgggcaacacaggaagactccatctcaaataaaataaaataaactaagacggtggctcaagcctgtaatcccaacactttgggaggctgaggcaggcagatcacgagatcaggagatcgagaccatcctggctaacacggtgaaaccctggctctactaaaaaatacaaaaaattagccgggagtggtggtgggcgcctggagtcccagctactcgggaggctgaggcaggagaatggcgtgaacctgagaggcggagcttgcagtgagccgagatcgcgccactgcactccagcctgggcaacagacagagcgagactctctcaaaaaaaaaaaagaaaagaaaaataaacgaaaaataaactaagaaggttccaactttttttttttttttttttttgagacggagtcttgctcttgttgcccaggctggagtgcagtggcgcgatctcgggtcaccacaacctctgcctcccaggttcaacggattctcctgcctcagcctcccaaggtagctgggattacaggcatgcgccaccatgcccggctgatttggcatttttagtagagatggggtttctccattgttggtcaggctggtcttgaattcccgaccttaggtgacctgcctgcctcggcctcccaaagtgctgagaattataggcatgagccactgcgcccagccaaaagtttccaattttttgatgtaataaaagctgaactatacatcactgagcatgttactgggtcaaaggcattaactattttaaacaaatagctttattggtcgggcaccgtagctcacacctgtaatcccagcctttgggaggccgaggcaggtgggtcacttgaggtcaagagttcaagaccactttggccaacatggtgaaactccatctctactaaaaatacaaaaatcagccaagacatggtggtgcacgccggtagtcccagctacttgggaggctgaggcaggagaactgcttgaatctgggaggcagaggttgcagtgagctgagatcatgccactgcactccagtctgggccacagagtaagactccgtttcaaaaaaaaaaaagtaagaaaatagctttattgagataatggtttgtatacgataaaattctctttcaattcatctgccagcagcagagatgaaaaaaaaatcacaatgctgtacgactaatagccttatgtaatttcagaacattttcatcactccaaaagaaacccatacccattagtattctttctccatttcccccagccctggaaaagcttcttaagtggcttaaaatatgttaccaaactacttgctagaaaggctgtccaatttatgttcctatcagccatatgcccatttttccatattttccccagaattaattatgatcattaaaaatacttaaggccaggtgtggaggctcacacctgtaatcccagcactttgggaggccaaggtgggtggactgctggagcccaggagttcaagaccagcctgggcaacatggtgaaaccttgtttctacgaaaaatacaaaacaattaaccaggtgtggtgacacacacctgtagtccccactacctgagaggctgaggtgggaggatggcttgagcccagaggttgaggttgcaataagccatgatcacaccactgctctcgagcctgggcgacagtgagatcctgtcccccgccaaaaaaaaaacttaagatagaaattagtaaataatttccatttacatatatttgaattcttttcttatttgtgagagtgaaattttatatatccattgatttttttttccccttttgtgaactgtccctccactctgtcagggactaaaatccaattaaatgatcagtctaaataaaatatccctggaatagcaattggtgtccagaaacatcgtgagaaattccagaaccaaacataaacttttgtgattaactataccatggagcctcactattagtaccagtaaattaaagtttgctataatcataaataatgaccacatgtctattttcaaagacatgatttctaggttcctttgttattacagattaagattgtctcaagggcacttcaaaacaaagcatcccattctacagggacagaaagcctgttactgtacagcacttgtgaccgcctggttaatgagcccaagtcaccggtaaattcaaaggaaaaattaacccaacctatatcatgcagtgacagttgttgcttgcaaaaaaaccagaaatgaaatcagctagctgctaacagtggagagaaagcactcaaccatacaattagggcagataaaaactaaaggtaaagagaggggaagtaaataaaccaaggcatccttgggagtcttctcggctcacaaagacaagaaccctgcaaagactatcatcaggaacattcactcaacagatttcattagaaatctgatgtgtagccgggcgcggtggctcacgcctgtaatcccagcactttgggagaccgaggcgggcggatcacgaggtcaggagattgagaccatcctggctaaaacggtgaaacccggtctctactaaaaatacaaaaaattaggtgggcatggtggcgggcgcctgtagtcccagctactcgggaggctgaggcaggagactggcgtgaacccgggaggtggagcttgcagtgagccgagatcgcgccactgtactccagcctgggcgacagagcgagactccgtctcaaaaaaaaaaaaaagaaaagaaatcagatgtgtagattttttttaacagaacaaatatctctacttaaatgggctccccatcttccatttcttgtttctattattttttactcaaatcctaaccttctaactcagaattgctgtatatccttaatcacttttttgggtcatttttatttatttatttttttgggggggcggacaaaaataaaatttttacatttcatttgtgaaataacaaattctataataacctcctagaaatacagtatggttcactgagactagtgactgcaaaaagcagatcccaacagagatctctacttgggactcagcttgtggactgctccaaaacaatattcctaattcatagactatgtagattcacagattgttaaaaaccacaaagcagtcaaggtgcagtgggtcatgcctgtaatcctagcactttaggagaccaagccgggagggctgttagagatgaggagtttgagaccagcctgggcaacatattgagattctgtctctacaaaagttttgcaaataggctgggcccagtggcatgtgcctctagtcccagctacttggaagactgaggcaagaggactgctggagcccaggaggtagaggctgcagtgagctatgattgtgccactgcactccagcctgggcaacagagggagaccctgtccagcccaacaacccccgattccccagcaaaaaaaaaaaaaaaaaaaaaaaactgaaagagctcagcagttatgtaggcctccttgaactatctcttcatgttaggtgggagagggagcttggagttcacacatttccagtgttcatttaccctcctctgatctcagagtacaagtcaaaccaaaaagttacccaaacctgttcttttctgatcctgtcaggatacatgcttgttgactctcacattcttcccccaaatcactcattcacagatgaggttgagactaatgaaaacacaagctattggaaggaacggcctgacatttctattattatgctagagacaataacagatcagtgaccagaagtaatctaggctggaagacctctgatatggccaccataaattctctggtacctgaaaaaaaaaaaagtatgaaaaccttggaatactatggtgacaaggtatctacatctatctccatcttttttttttttttttaagatgtaagagggcatattcacagttacggcaaaatatgactgaggatacaaaacactgaaaattaagagctacctacctgaattctgatgggtttttttttgtactcctatctcctaatacctcaaaatgcataaaaatctcagttaatgatatgtcatttttgtcccattattcaatacaataaaagagaaactaaatatttcagatttgatttttctgacttgagctaatgatcctcctccctttcttaaacatttaaaatgtttgttaactgaacagtcagtcactcttccacatttctaagcgaaatgtcaacactcatactcaatatgacactactagaatgtgaagcccaaatttcattttaaatctctaattacctaccaaggaagctcatttccccaaacaattctgtgaactccaatgccagactatccaagtttctggggacttaacagtatctgtgcctttcacatgtaggagtcctctccagaaatggcatacccaactgttcttttagtctcaagagtcacattgtcggccagggacagtggctcacacctgtaatcccagcactttgggagaccgaggtgggtggatcacctgaggtcaggagttcaagaccagcctggccaacatggtgaaactctgccctacaaaaatacaaaaattagccagacgtgatggtgggtgcctgtaatcccagctactcgggaggctggggtgggagaatcgcttgaacttaggaggtggaagttgcagtgagccaagatcacgccattgcaccccagcctgggtgacagagcgagactccatctcaaaaaaaaaaaaaaaaaaaaaaagtcacatcctcattttgttgtctctctcctgcaccttcttaaaatgtgatgggactgtaacaagagtaactgtgttctggatacacaacagacaagctactaggaaatgccaaagataaagaccaatcacagcaatgctttaagagacccagagtacaaaaggggttctaagtgagcctctaaacatagcatgttaataagcttaagtaaacactggtagaggccagcaaattaaagctagctgtaacatctaaagatatgtcccagtcacagcagctctttatgtgcagacctcaacctcacattctgcttcagaaacctctctcagacaagcggcagaagaaaggtcccctcctcgcagatcacgaggtcaggagattgagaccatcctggctaacacggtgaaatcccgtctctactaaaaaaaaatacaaaaaattagccgggcgtggtggcgcgtgcctgcaatcctagctactcgggagactgagtcaggagaatggcgtgaacccgggaggcagagcttgcagtgggccgagatggcgccactgcactccagcctgggcgacagagcgagactccatctcaaaaaacaaaaattaattaaaaaaaaaaggtcccctcctcaaaaagaacagcatacatgctactaattcatttgcattcataaatctttggtttaaaaatccatttaaggcccggtacagtgcagtggctcacacctgtaatcccagcacatcgggaggctgagacaggtggattgctttgaggtcaggagtttgagacgagcctgggcaacctggcaaaactgtctctacaaaaaaatacaaaaattagccaggcattggtggcgcatgcctgtaatcccagctgctcgggaggctgaggcaggagaatcgcttgaacctgggaggaggaggttgtagtgagctgagatcgtgccattgcactccagcctgggcaacaagagccaaactgtctcaaaacaaaaataagtaaaccctgataaagtgtttttttccatcaggcagtcatactttgatacaaattggtttaatgaggcccagccttcttgctagagataccaaaaccactgtgggaaatgttttgactggataaaacactcttcagtgaggtgctatagtgaagatttctacagagagcaatgggaatcagtacctaggggtcaaggaagaagcacttggctgggcacggtggctcatgcctataatcccagcactctgggagcccaaggcaggaggatcaccagagcctaggagttcgagaccagcctgggcaatatagtgagaccctgtctccacaaaaaatttaaaaaattagccaagcatgatgatgtgcacctctggtcccagctattgtggaggctgaggtgggaagattgcttgagcccaggaagtggaagttgcaatgagccgagatcataccactgcactccagcctgggtgatagagcaagaccttgtctcaaaaaaaaaaaaaaaaaaaaaaaggccaggcgcagtggctcacgcctgtaatcccagcactttgggaggccgaggcaggcagatcacctgacctcgggagttcgagaccagcctgaccaacatggagaaaccccatctctactaaaaaaatacaaaattagccggttgtggtggttcatgcctgtaatcccagctacttggggggctgaggcaggagaaatgcttgaatctgggaggcggaggttgcagtgagccgagatcacgccattgcactccagcctgggcaataagagtgaaactctgtcttaaaaaaaaaaaaaagggaaaaagcactaccaaaaataaatgaagaacgtggtaggaaaagtttaccatcgagtttgctaaaggctctggaagccacaaatgccagagactactgtgacacctttaactgggtctctttcaaactgggagaggattagcttaatagctgaacactgttttcgggtcaatgaacttggaattatttgttctgcttcagctcactgaaaatctttcagataaaggataataaatgttttgattttaaaacaaattttaaggggaaagctatttttagcaaaaacacaattaaaaaacacacatattttgttgtttcaggcttatccagaatagtcttaatccattcagcagcagaaagccccctataagtcagttcccttggaacctcctccattacaaataaatccaaaattatggttggtagatcctatgaagtcctaggtccacttcaggtgatgacaactgagagaagcagcagttccattttcacagagcatgacacacacaaataaagcatatttacagtgctacttttccagctcaggaaaactcacacacagtattagacatcaatttccttgcctataaaccatggctaaggatgcctctctaattccttggaacagggaggagttacaatcacaggtggctttgacacgcgtgtaatctccgtcatcatttcctaactgttctttaaaagcttgtaattttctttcaattttcagctttgggggctcacactgacgcttagacttcataaacttccttcctagatatataacatgctaattcatgcgaatcgctcaagcttgttttataatcacacctatggatacctttgcaagacttcacgcctctactccaacaataaactactaaaacctctggaaacaatctagaacttgcacttgagcagacaagagaaaggaagtgatggctttaaagggacgcagctttgtcgggctcaaaagaggagccctcgctcactcttgagcggctcaagatgttaccagaagctcccgccagatgtgcggggcgggggtgcgggcacaggtaaggcagagaagatgggtggacggccctgggaagaactagggtgccgaagcctgcaggcgggatggagtggaaggaggtgaggcaaaattaggcaagtacaggaaggagccagtgcagcgaagaaaacagggcaggcgagaagtagagccctagaggaaccaacgaattcgggactcggagggtttccgagggtccagttctctcaccagaaagccgcgttcagccccaggcaccacagagcgctcctagctggccgctcccacaccagggctgcctgcacccgactcagcagaggctcgtaaggccccagcacctccaccagggcccgctgcgccgcctcaacctgctggtcccgctcccaggagcctgacacatctcggcggcccctgaaagtcgaccccgaagccgggcctggggtcgtgggaaccccttcggcctcagccatctccccgcggcagccacaacatccggggccgtggcccgacaagtcacaataacagcaactgcgcagatgcgcgattcggcgggggaggtggcttcgcaccacagcgcgcttgcgcgcaggcccaagcaggcgcccacccagaggggagggaggacgccgtaccccgccctcactgaggcgcggagccggatccggaggcgccgagccgcatccggagccgcgcacgcgcaatctgcatgaacgaaggccagtgcttaaagacgtgccattcattgccagaactcgattctcattggagcggaggaagttcgtgggtggagctggttgtttggcgcctgcgtcttgcggcgagcgggctggcgtgcggcgccgttgcgggcgggagcggctgcaacgccggtgcctgaggagcgatgccgagggaaatcatcaccctacagttgggccagtgcggcaatcagagtgagcgaaactccggcccctcagctagccaggttccttagggtcaatgggatctcgctgtgggatcctggactccatctgtccttgccagaatcgtagttctctgaaaggcgagacatccctgacccagtgtccacttgcccaaccccgaggggccctcccctgcccagtccctggcgtacagtcctttcctcagacacgggagagtcctgcggcttgacttcttatccctggacgcaggcgcccagtcccccggctcctgattggaacctgcccggacctagatatcttctttctcccctgcccgccccttccccccagttgggttcgagttctggaaacagctgtgcgccgagcatggtatcagccccgagggcatcgtggaggagttcgccaccgagggcactgaccgcaaggacgtctttttctaccaggtgcccccagcgacttggccgggggcggcagttgcccaagggggcggaagggaagggagtggcctggtactgggaaccccgctgggcagtagggccaggcggctggcttgaggagggagggccggagggagccagagttgggaggacttcggacttgggccgccctagctgattgggccccctcctggactccccttgacaggcagacgatgagcactacatcccccgggccgtgctgctggacttggaaccccgggtgatccactccatcctcaactccccctatgccaagctctacaacccagagaacatctacctgtcggaacatggaggaggagctggcaacaactgggccagcggattctcccaggtcgtttcctattccctggcagggcccacaactcgctgggtagggacaggctctatgacgtcccgaagagagggaaaaccggatcagggatgtatgaatgctggagggagagacctggctgcagggagtggactatgtaatattgtcaagcgcctacactagctaatgcagtgtgccaggtcattctaagtgctttacatatattaatttttctaaatctcccaacaaccctagaagtaagtactacaggtccacagtcccttatctgcctttccaggatccagaaagccatgaaaccaaaggacatttcataactagtttatcagcaaaaacaaatttcaatgaagacaggctgttttatagtttcttttttttaatttttatttatttattttttttgagacggagtctcactctgtcgcccaggctggagtgcagtggcacgctctcagctcactgcaacctctgctgcccgggttcaagcgattctcctgcctcagcctcccgagtagctgggattacaggtgcttgccatcacgcctggctaatttttgtatttttagtagagacggggttttactgtgttagccagggtggtcttgatctcctgacctcgtgatccacctgcctcggcctcccaaagtgctgggattgcaggcgtgaaccgccatgcccggccctatagtttctatccaacttactgtcattagtgatgccttttattacagaaatactaatatatttgattaacgtgcttctgattaaataaaaattcccactggaattttatttaatatatagtatatataccataatacctttctaaaatctgaaatattttgaattccaaaacataactggccccaacactgttagataagggtatatggacctgtattattaccttcattgtacagatgaggaaactgaggcatagagcaattaaataagctgcccagagctacatagaagtagagttaatgggccaggcgtggtggctcacgcctgtaatcctagcactttgggaggccaaggcaggcagatcacctgaggtcaggagttcaagaccagcctagccaacatggtgaaactctgattctactaaaaatacaaaaaatagctgggcatggtggcatgcgcctataatcccagctactggggaggctgaggcaggagaatcgcttgaacccaggagacggaggttgccatgagccaagatcgcgccactgcactccagcctgggagaaagagagagactccatcgcaaaaaaaaatagagctaatgtatgaacccaggtagtctgggtgtagagtgctttcttgtaaccactgcaccgtactgcctctcaatgtagataaaagcaggtagctatgctccataaaaggacttctgggtgttataaggagaattgagggtggcttttctgaggtcagagacctcccatggttctgtcccactctgaccctcccctatgtctgtacagggagaaaagatccatgaggacatttttgacatcatagaccgggaggcagatggtagtgacagtctagaggtaagtgtcccaggaatgctggtaggagccgacatgggcaaggcttggcagcaccctctagaagcgacctgttaggaacaagacccactcatgtaccctttgcactggacagaagctatcaggccttgccagaaacaaggcagttgcctaagctgtataagtgaggggactggatgggaagcaagggctcgggaaaatgggagtcctaaaaaactatgagatgggtctagtttgacatcctgccactagatacctgtacactgactgccccttccccatgcagggctttgtgctgtgtcactccattgctggggggacaggctctggactgggttcctacctcttagaacggctgaatgacaggtaagtttgtgtttggggattaggaaaggtctccaacttggcttcctaaatgactaggggacccagcagatataactccatatttgctggaacaggaaagagttcttatattccctcctatagagaggaaaatgaagttacaatgactgagaaccccatcacactcccagtagtgggaactggagcctagaacctgagccctggatgaaagtcgagggagtgtggccaggtctcaatttggaagcccagagtctaagatgtctctgcccttccccctgtagggctacagacttccaaaagtcaaggctcccttctctactgatttgaccccaccccagtttcgccatcaagatttatctgcttctggacagttgttagggagcgccatgttcaccaggccttcggtctgttgccctgatcctttccccaacccccaccaggtatcctaagaagctggtgcagacatactcagtgtttcccaaccaggacgagatgagcgatgtggtggtccagccttacaattcactcctcacactcaagaggctgacgcagaatgcagactgtgtggtgagtcctggattctacctctcccaactctcaacaccccatacccactcgagtctattaaatcattttcatgtatttaaaaaaaatccattttagccaggtgcagtggctcatgactgtaatcccatcactttgggaggccaaggtcgttggatcgtttgagtttaggagttcgagaccagcctgggcaacatggcgaaaccccatctctactaaaaatacaaaaattagtcgggagtggtgatatgtgcagaaggatcacttgtgcctcagaggcaggggctgcagtgagctgagatcatgtcactgactgcactccagccggggtgacaaagtgaaaccctgtctcaaaaaacaagaacaaaaaaaaaaactgtttaaataattaagatgaaaagaaaaatttaaaaatccattttgagccctcctttgccctaggtcagtgcaaatctctttccagtgagtctttctggccatgaagctcaaaggaaattaagcttcagagcctagggtcaggcagagctcctgtttttcttatccccattgatctgtgatcctcttctgtccccccaggtggtgctggacaacacagccctgaaccggattgccacagaccgcctgcacatccagaacccatccttctcccagatcaaccagctggtgggcccccactcctggactcctttggacttgaagccctccttgttggagggtcatttggggaagggaggtcccacccaggctgaggcccataacatggcacgcctgtccccaggtgtctaccatcatgtcagccagcaccaccaccctgcgctaccctggctacatgaacaatgacctcatcggcctcatcgcctcgctcattcccaccccacggctccacttcctcatgaccggctacacccctctcactacggaccagtcagtaagagcagccttcagtgtcccaggccaggccggccctgggcccaacaggccctgtcctagcctttctctcttccccactgccccaggagctaccctttgtggaccccaaggcgcggcgctcagggactggcacagagtgggcgactttcttgctgacttgctctccaccctccctctgcctttggcttctgccaaagagaagccaaagggggactgtgccctgagcgctggccgggtccctgtctcactgtcctatcaggtggccagcgtgaggaagaccacggtcctggatgtcatgaggcggctgctgcagcccaagaacgtgatggtgtccacaggccgagaccgccagaccaaccactgctacatcgccatcctcaacatcatccagggagaggtggaccccacccaggtaggggaggccccttcatcccacaccctggacctgcaggggtagaggagaggccacctccactgctcctatgcccaccccaggtccacaagagcttgcagaggatccgggaacgcaagttggccaacttcatcccgtggggccccgccagcatccaggtggccctgtcgaggaagtctccctacctgccctcggcccaccgggtcagcgggctcatgatggccaaccacaccagcatctcctcggtgagtctcaaagtttgcaccttttttccctgaatcagtttcctgactatacctcacctctctgcatctgctggccctgcttctagcttttttgctgtgggcatagcccagccttggttccccagctttctgggccacgttattctttgaagttctttgtaacccctgttttctgcacaccccaagctcttcgagagaacctgtcgccagtatgacaagctgcgtaagcgggaggccttcctggagcagttccgcaaggaggacatgttcaaggacaactttgatgagatggacacatccagggagattgtgcagcagctcatcgatgagtaccatgcggccacacggccagactacatctcctggggcacccaggagcagtgagtcccccaggacagggaccctcatctgccttactggttggcccaagccctgcctgactgaccaccccctcagagcacagatcagggacctcacgcatctctttctcatatacatggactctctgttggcctgcaaacacatttacttctcctcttatgagactatttatctttaataaagcactggatataaatcaagtcactgctccctttaaagcctttgggttctggagatgcggtggggatgcctgttctttctccatcattctgacagggtcctcacccacttccagcatcttcaattctgaaccaacagcttcccctaggtttttcctctgcctagttttggagaacgctggtggggtttgacccacctgaaattcctttccagggtaaaaaggcccagagatattactttgttctctgtctgaccctttctgggtccccgttccctcccaccctcactgtatcaggtgaatattccaccagcctcatgtttccacatcagagtgtctgattaatcacaacctgaggcccaaggccaccaccactgccactaggccatgaacaagcaatggagtccaacccaatacctttaagcttctagcaagcagtccaggagagccgctcgtttcaggcagttggagtctagcagcatcaagtcagcgaccaaatctaaaacctagactgtaagcaggatcataagtggttccatagctaaggcaccgtaattctcttctctagtggttgccagtaatttaaatggccagtgccttctacttctggtggaagattgcagggaggtagtaaatacataggggcctaagtcttcaggattgtttttttttttttttgagatagggtcttgctctgtcgctttgtcacccaggctggaatgcagtggcataatcacggttcactgcagcctcgacctccctggctcaggcgatcctcctgtctcagcctcttaagtagctgggatcacaggcacacaccacctaaatcttcaggataaaaagggcaaagcaggttctccttagagcatggtgggttgtcagggccccattaggctcttatacacaccataaagttatatagtagtgacagctaacacgcacacatacgctgtgagaagtacattattttgttgaatcctcacaacaaccctatgaagtggtagatactaatttttttttttttgaaatggagtctggctctattccccaggctggagtgcagtggcatgatctcggctcactgcaagctccacctcccgggttccagcagttctcctgtctcagcctcccaagcagctgggactacaggtgcccgccactgcgcctggctaatttttttgtatttttagtagagacggggtttcaccgtgttagccaggatggtctcgatctcctgacctcatgatccacctgcctcggcctcccaaagtgctgggattacaggtgtgagccaccgcacccggctggtagatactaatttttaaaatacaataacaaggccgggtgcggcggttcacgcctgtaatcccagcactttgggaggccaaggcaggcggatcacctgaggttaggagaccagcctggccaatatggtgaaaccccatctctactaaaaatacaaaaagttagctgggcatggtggtgcatgcctgtaatcccagctactcaggaggctgaggcaggagaatcgcttgaacctgggaggcgaaggttgcagtgagccgagattgcgccactgcactccagcctgggtggcagagcaagactccgtctcaaaaaaagaaataaaagtaaaacaataaggccgggtgtggtggctcacgcctgtaatcccagcactttgggaggctgagatgggcgtatcacaaggtcaggagatcgagaccatcctggctaacatggtgaaaccctttctctactaaaaatacaaaaaaaaaaacaaatgagccagacatggtggcaggcgcctgtagtcctagctactcgggaggctgaggcaggagaatggcgtgaacccagaaggcggagcttgcagtgagccaagatcgcgccactgcactccaacctgggcaacagagtgagacttttgtctcaaaaaaataataaaaataacaataaaagtacaaataaaaaccaatacagtataacaatgatttacaagcatttaccttgtattaggtactacaagtaatctagagatgatttaaagtactgtacaggaggatgtgcataggttatgtgtaaattctacaccatcttatatattttcttctttctgttttttttttttttttgagacagtctcactctgttgcccagtgcagtgcagtggtaccatctcggctcgctgcaacctcttcctcccaggttcaagcaattcttgtgcctcagcctccctagcagctgggatacacacatgcgccgccatgcccagctaatttttgtattttttgtagatatggggtttctctatgttggccaggctggtctcgaactcttgacttcaagtgatctgcccaccttggcctcccaaagtgctgggataacaagcatgagccatggccatattttattttttctaaaccattttatttaattaaggatctgcagattttggcatccttgggtgtcctggaaccaataccctgtgggtaccaagagacaactgtacttgctcactattggcctaggaatgtacttttccttctatgaacctgtttatctttcatggttatcccccctttgccaggtaagtatgaacctgtttatctttcataaagctctacatgtgaacagagaacaatatacaggccaggcccctatgaacagaggggaccctttcaggactgatgggcagagaacaggccatcagaagctaggccctaggctactgaggggtagcagagaggccacgagcctgttatcatcacagccaagacaaccagcctgtcactatcagttgccagtgtcttcagggggctgactcagggagagccagcctggttggtgtgaaccagctgcctgttctcccaaaaggaaggaagatgacttcagtgaaaaccagtgtgcacctggtcccttctcagctcctcctcctacttctgtaccactaggttccttgcctcagtcctcctttccttcccctgcccttgaagaccaaccttgcattagttgctccaggcatctgcacgagtgctggtgctgagtaggggatcacaagctggcacaagtagcgaggctgctgtatgtgagtggccagctggcccacctccaggccataagcaacccccaggccctcttttggaggatccagttaagtagcacgtaaagccctgagcaggagaaaacaccaggtagtccagaataaaagttatgtctggttagtactacagccaccaacccagaggggtgaatacatgccctggggggaaaaatggagctgcaaagacacctccttttcctgatggctaagtatcaggcattctaagcacagacaaagccttcggtgctaacttcagaaccagatccctcccccaaggctatttccagatcacccatcaccccaaaccagggcagcccctccctgttcttggccagcctgcaaaccccaaagtgtgtcaactagagggcagctcagaggccaggtggaaagggagggaggcctctgggaatcaggacagcaggtggtgctggtagtgaaaagtccctgtggtttgagagactgtaagccacagaagagactgtccccgctgagagacaaggactgctgcagaaacagaaagcctggaggctggccagtgctcaagcctggaataggaacttctctgcaactaaataaaagaaaattagctgtttaaagctaatgttcctagacttcagtgtgatgtgaccccagggaccctcaaacatgcatgacacggacatctatatcaggaagctcataggcaaaaatagagctgtgtaaacgaatctgaaacttagaagctgtaactttggaaagtgagacgtgaagaggtggcgagcacacacggtgggtggggagcacgtggcgagcagagacactggacaaagagttggtgggtcagtccattaagccttatcctggtctctaccagttgcaaacattctagatctccctagtaaatgggctcctcagtggagagtccattgaaatccaacatgtaacccacccccaagtaatgcccacctccagcacttgctccctttccattccttctcaggtatctcaagcagggaaggggctgccctaggaaagtaacagaaatatttgaaattgacattctgaactactaatacatcacttataagatttacttaaatttggccaggtgcggtggctcacatctgtaatcccagcactttgagaggctgaggcgggtgaatcacttgaggtcaggagttcgagaccagcctgaccaacatggtgaaaccctgtctctatgaacaatacaaaaattagccaggtgtgctggcaggcctgtaatcccagctactcaggaggctgaggcaggaggattgcttgaacccaggaggcagaggttgcagtgagctgagattgtgtcactgcactccagcctgggtgacagagcgagactccacctcaaaaaaaaaaaaaaaaaagttttaaaattagccaggcatggtggtgcatacctgtggtccctgctactccacaagctgaggtgggaggatcgcttgacccgggaggtcaaggacagtgagctgtgatcacgctactgttctccggcctgggcaagagagtgagaccccggccactccaaaaaaaaaaaagaaacattccatgatggggacaaaaaattaaataaaataagaacaacccccccgcccccagaaatcttcacattcccttagtcctaggaaaaccaggacagttggtcaccctaaatgaaaaaccaccacggagaatgattagaaaatcgcaaagcagtacatataaataatcagggctgaattaaggcctggtagatatttgttcatgaattaagcaaggatttattaaaaacggagattgagttgctcagcactaagcttcacaatggaccctacctaaaggggttcccacttttactagaggggtgatatagcattgttaccatttggatagtgttttaccctgcatgatgcacctgcacatgcattcattatctgggttttctgagggaggtttttttcgtcatttatcatcatagggaaatcggtttagggagggtaagtaatttgtccaacatcacacagctggtacataaaagacacactagacctcatgtcctctggcaccaaatcaatacactctttcctccacacccactaagaagtgctcagaggtgatgcaacctgaattgcagttgttggtttggagagttttatttatttatttttttgacacagagtctcgctctgtcacccaggctggactgcagtggcgcgatctcatttcactgcaacctccgcctcccaggttcaagcaattctcctgtctcagtctcccaagtagctgggactacaggcgcatgctaccacacccagctaatttttgtattttcagtagagacagcgtttcaccatatttgtcaggctggtcttgaactcctgacctcaggtgatccacccgccttggcctcccaaagtgctgggattacaggcatgagccactgtgcccggccttttgtgttttatttttgagacagggtctccctctgttgcccaggctggagtatgggtggcacaatcatgactcacttcagccttggctgaagctatcttcctgcctccgcctgccaagtagctgggaccactggtgcgtgccaccatgcctggctaatttttaaaattatttgtagagacaaggtctccctatgttgcccaggctggtctcaaactcttggcctcaagagatcctcttgccccagcttcccaaagcgctggcattacaggcataagcctctgggcctggcctcagttgcaggttcttaagtgagaagggacatgatgaaatctgtgttttagggctggtgcggtggcttgcacctgtaatcccagcactttgggaggctgaggcagtgaaattgcttgagcccaggagtttgagaatagcccgggcaacacagcaaaacccgtctctagaaaatatacaaaaattagcagggcatggtggtgtgcacctgtggtcccagctacttggggggctgaggtgggaggatcacttgagcccaggaggcagaggttgcagcaagccgagatcacaccattgtactccagcctgagtgacagagcaagaccttgtttcaaaaaaaataaaaatctgtgttttaggatactttgtctgaagctggcttaaaatgtaaatcagcaaattggcagttttttgaatgaaaaaacactcagtggtttttgggggtgttgttgttgttgtttagagacagtcttgctctgtcactcaggctggagtacagtgatacaatcatagttcatggtaaccttgaactcctgtgttcaagcaatcctcccgcctcagtgtgccaagtacatgggactacaggtggtgccaccatacctggctaattttaatttttttttttttttttagaaatggggtctcactgtattgcccagattggtctcaaactcctggcctcaagtgatccacttgctttggcctcacaaattgctgggattaaggcatgagccactgcacctggcctttctttttgttttctatattttccaaatggtctataattaatatgtattacttttataatcagaaacaagtatattttaagtgtaaataagtagaagagtaaacaggaaaagaagctagaggtaaagtggccacagatggtaaatgacaataaggtagatatgaaaaacagagatgattataacagaacagaaggagaaatctaactgcttggtggtggagatcaatacattcttatttcagacagatttttactctctttctgaaaactatgggagacatgagggtttagggttatttcaaaaaacaagtggaggctgggtactcatgcctgtaatcccagcactttgggaggccaagtcgggaggatcacttgaggccaggagtttgagatcagcctgggcaacatagcgagaccctgtctccacaaaaataagccagggctggtggcaggtgcctgtattcctcgctactcaggaggctggagtgaggaggattgcttgaacccagaagttcaaggctgcagtgaactatgattgtgccactgcactccagcctgggcaacagagggagattctatctcaaaaaaaaaaaaagtggatatatttgattcaaatttagaactacaaaagaatagcaagcaaagaaacaagctcaatatttttcataccatgaccaacaagaaaacttaacattctaaatgaactttctataatatattagttagtgtacaagtattataaaatatacattcatgatatacaattgtatacattaatatgcaatacaaatggatataaagtatctcaacaaaagtttttttttgttgtttttatgtttgtttgttttgtttgtttatttttaggagacaaggtctcacactgtcacccaggctggagtgcagtggcatgatcatagctcagtgcagcctcaaattcctggactcagcctgtaatcccagcactttgggaagccgaggtgggcagatcacctgacttcaggagttcgagaccagcttggccaacatggtgaaaccctgtctctactaaaaagacaaaaattagccaggcatggtggtgggcatctgtaatcccagctatttgggaggctgaggcaggagaatcacttgaacccaggaggcagaggttgcagtgagccaaggtcgctccattgcactccaggctgggccacaagagtgagtctcaaaaaaaaaaaatgcctgggctcaagtaatcctcctgcctcagcctcccaagtagctaggactgcaggtgcctggcaccacacctggcctcaatgaaactcttaaagtgatgaataaatactcgaaatgctagggatggactgctgaacataaatataatttttgcatataatcatatgctttggtttgttttttcaaattcaaaataaaatgttgcaaaacataagttgtccagctaggcacagtggctcacacctgtaatcccagcactttcagaggccgaggcagtgggattgcttgagcccaggagtttgagaacagcctcagcaacatggtgaaaccctgtctctacaaaaaatacaaaacttagctgggtgtggtggcacacgcctgtacccagtcacttggggggctgaggtgggataatgtcttatgggatgggacagtgtctttatctctatttccctgttatctactacaggccctgcacaatgtagctgttcaaaaaacatttgttgaacaaatgaaaaaatgatgtcaaggccataacttttactcctcctcttttcattaacaagaagacattaagagatttgccacataatcaaataaaagcacaccccaggacaaattaatgtgttgaccacattggatcaggaatattgagactttaatcctagactgttttcagagaggagttggaaaatggggaaaaaagatgtaatttctccaactagaaattaacttattaaaattcatgcataacataagctattccaagattccccctttttttttttttttttttttgacacagggtcttgctttgtcacccagactggagtgcagtggcacgatcacgactcactgtagccttgaccttctgggctcaagcaattccctgccttagccttccaagtagctgggactacaggcatgcaccaccatatctggctaatttttttggtatttttttgtagagacagggttttgccatgttgcccaggctggtctcgaactcctgagttcaagtgatctgcccgtctcagcctcccaaagtagcaggattacaggtgtgagccaccaggcctggcctattccaagatccttacaccaaatagcttatagtatcagaaaccaaatggcttgatgtagctgaatttctgatacttgatactttggaaattttcccaatggacacattatacaagatgccattagcacctgaatggaaacaaactggtgactacaagtattctacatcctgccagatcaaataatagtcatgagtcataactggatctgcagacagctgcgtaaaacagattatcagtggaaggtatggcagttccaaggcctgacctgcaaagtcagtcgggaaaagggtgcggtcagaaccagcacagctggaaggtcacccacagaataaaagttgccaactggatgtgttcctctaagacaactttgcaatgacacagaagcacagccatggtcaagagatggccagaaggaggtggtgaggagctgagagaggtccttggtgatcctcaacctacaactgggctaatgaggcaaacactggaccaaacagccctaaatctcacccaaagacttgaaggctgtccgtcttcgttcccctgacacacacagtactccctgagaattcccattctctctacgtcccatccttctttaggatttctgaacctagagaaatttgctccctgaaattttctgtggtgcccacatagatttcaagttatggaaatggctctataaggaatacctggctgagtgcagtggctcacgcctgtaatcccagcactttggcaggccgaggtgggtggatcacctgaggtcaggagttcaagaccagcctggccaacatggcgaaaccccatctctactaagaatacaaaaattagccgggcatggtggtatgcgcctgtaattccagctgcttgggaggccgaggcaggaaaatcgcctggacccaggaggtggaggttgtagtgagccgagatcgtgccactgcactccagcctgggcaacagagcaagactcagtctcaaaaaaaaagaaaaaaaaagagtaccccatcagcctgggccccaaggatggaaatgaatcacagataacactggccacagggatggtatagaaaggtactaggtccccagggtacccggaagggatgaagtagagatgaacagaatggagtttaggtcacggagcttaagaaggccaggttactacttctgcttctaagacacaaccataggcaatacggctcaagaggatcacctaccccgagccaggagacaaccttaaactgaagtctagtgtggttccttggaaatccttgtgacttggccctcttgtgaggcataaattgaatctggcctgagaatatcctaatactctgtttcctctgacaacaaattgtgtttagtgacctccccatagtgactgctctattcctactggctatgttccattggatgcatagtatttatgtgcatagtattttttttttttttttgagatagggtctcactctgttgcccaggctggagtgcagtggcatgatcactgctcacttcaacctccgcctccccgtttttttgttttttttttttttgagaaggagtctcactctgttgcccaggctggagtgcagtggcatgatcactgctcacttcaacctccgcctccccgtttttttgtttttttttttttgagaagtagtctcactctgttgcacaggctggagtgcagtggcatgatctcagctcactgcaagctccgcctcccgggttcaggccattctcctgcctcagcctcccaagtaactgggactacaggcgcctgccactacgccaggctaattttttgcaattttagtggagacagggtttcactgtgttagccaggatggtctcgatctcctgacctcgtgatccgcccgcctcagcctcccaaagtgctgggattacaggcgtgagccaccacgcccagctgcctccccatcttaagccgtcctcccacctcagcctcccgagtagctgagactagaggcacatgccaacatgcctggctaatttttaatttaatttaatttaatttatttgttttattttattttatttattttgagacagagtctcgctgtgtcatccaggctggagtgcagtggtgtgatctcggctcactgtaacctccacttcccaggtacaagtaattttcctgcctcagcctcctgagtatctgggattataagcacctgccaccacgcctggctaattttggatttttagtagagacagggttttgtcatgctgcccaggcaggtctcgaactctgaaactcaagtgatcttcccgcttctgcctcccaaagtgctgggattacaggtgtgagccactgtgcctggcctacacagtattgatttctctgactgccttacagttgccaccagctcactcagaaggttccagactactatctctagcccacagagatacatgtaactactgttatctggtgatgtagcagttgttaatccataggccctaggccatcaaaatgagcatgactacactgccagactccattcacttgtgttcctgctgtgtgaaccacaacgccgctataaatgcattgttccttctcttttgccctacaccaaaagttcttaacttttgttcattcacagatctgtttgagaatctgcttggacatttcccggaaagaaatggacacatagatttgcaaacaatttcaagatgttctccacacataaagcccatccttgggatcccaacttaatgctcacaatttctgatggtaagaaatgaagacacttcggccaggcacggcggctcatgcctgtaatctcagcattttgggaggccaaggcaggtggatcacctgaggtcaggagttcgagaccagcctggccaacatggtgaaatcctgtctctactaaaaatacaaaaattagctgagtatggtggcacgcacctgtaatcctagctactcaggaggctgaggcaggagaatctcttgaacctgggaggtggaggttgcagtgagccaagatcacaccactgcactccagcctaggcacagagtgagactgtgtctcaaaaaaagagaaaagaaagaaagagagaaagagagagagacagagagaaagagaaaaagagagagagagaaagagaaaaagaaagtgagtgagagagagaaaaagagagagagagagagagagagagagagggagggagtccaaccagttgctgttgtcacctgtccacctagctcaggcagcaggctcatcatgaccaatcaaggcagagctcctctctgagactgacacaggaccctccccttgcccacacccagacactcccacttatgggtctagggcagaccttacatacctttccctatggccacctaggtgacactagtgcccactttgacaccttggaacagcggatgaaaaggacttcccgctgggcgcagtggctcacacctgtaatccaagcactttgggaggccaaggctggtggttcacttgaggtcaggagtacaaggccagtctggccaacatggtgaaactctgtctctactaaaaatacaaaaattagccaggcatggtggcgggtgcctgtaatcccagctagggaggcagaggttgccgtgagccgagatggcaccactgcactgcagcctgggtaacagagcaagactccatctcaaaaaaaaaaaaaaaaaaaaaaaaaaagctgggcatggtggtgtgcacttgtaatcccagctacttgggaggctgaggcgagaagatcgcttgaacccaggagagggagattgcagtgagctgagatcgagccactgcactccagcctgggcgacagagcatgactctcaaacaaacaaacaaacaaaaaaactttccctaggtctactaggccacgtcttttctgtgttcctccttctcccttcttgtctttctctctctctctctctctctctctgtcacacacacacacacacacacacacacacacacacacacacactccagctgtcagtagaagagccagagtcagcaccttgaggcctcctggagcagagattttctggaaagtcttcagggaagactctgctgagctcagtgacaattgccacccggccactggccagattacatttcctgggtcactttgaccttctcaaaggccgcagccaccattgagctggtattcgctcatgctgacatcctactccaaccctctctgcctcatcaaatacagccttgattttggtacaagcctaaatgctcatcatatgcacacatatgctggggttaccaccagccttccccaaactatgccaaaaatgattctatacatctcacaaagattcatcatgaacacaattgaaggcctatggatcctcgggatagggaaagatctccctgcccttccatagaattgggacttcttgtgttctagcctttcccagctatgggaaaaacaaccaaggtggcttctcttgtctacaaacatggacccaccattcctaaggtacagcattagcaagaaaaacaaaactaaggaattaaaaaaataaaactctgaagatagacgaaagagtcaactctttttttttttttttttttttttgagatggagtcttgctgtatcacccaggctggagtgcagtggcgtgatctctgctcactgtaacctccgcctcccaggtttgagtgattttcctgcctcagcctccctagtagctgggattatagatgtgcatcaccatgcccagctatttttgtatttttagtagatgaagtttcaccatgttggccaggctggtcatgaactcctgacctcaggtgatccacctgcctcggcctcacaaactgctgggattacaggcatgagccactgtgcccagccgacagagtcaacttttgatgctgtgaattgtcacgtgaatttctcctttgttttttgagacaaggtctcactctgtcatccaggctggaaggcagtagcaggatcatggctcactgcagcctcaacctcccagactcaagcaatcctcctaccttagcctcccaagtaactgggactacaggtgcacaccaccacacctgtctaatttttttattttttgtagagacagggtctcactatgttacccaaactggtctgaaactcctgggttcaagcaattctccttccttggcctcccaaagtgctggaattacaagtgtgagccactgtgcccagccattaattttaattctgtcaataacctgtgatcaaaattttattccaagatccagctctgttctggcttcttactatgtgtttcccagcaatgtaatgtaattaaaatgttatcataacctgtctctcagaatgttgttactacatttgtgatcttgggcaggtcacttcctgtccctgggcctcagtttcatcattctgttgctcaacaaatatgtattgagtagctagtaagttccaggcattgtgctaagtgctgaagacaacaaagatgagcaagatatagtatggctgaagaattgctcattccattgtttatgtgttaatgtaaataactcatcatgtacctgtgtgattagggctataatgaaggttggacaaggtacgagagaaaaactggaaggggaacacctgtgtctgatgggggttaggggtttgtaaaataaggggttcggcttctagaggagtctgttattctaagattgtgatacattcaaaaggacacagagtccatttagatattctgtttcagggaaatgtgtacaataccagccctctgctagtgcagataaggagtttaccattggcaccaatacctctttttcaagttgagtagaagccagattcctattatcagtcgtttgcattactcaattctaacaatcacttgggaacataaataatacttggtaaaattaattcttttccaatacaaatgaaagaaacatatcacatatacttgtgccatacatacgcttaaccaacaaacacatcatctggggaagaaaaagcaaacccagacacatataaaatgaaatcatcgtaaggtttcattttatttatttattattattattttttgagacagagtttcgttcttgttgtccaggctggagtgcagtggtgcgatctcagctcattgcaacctccacctcccaggttcaagtgattctcctgtctcagcctcccgagtagttgggattacaggcatgcgccaccatgctcagctaattttgtatttatagtagagacagggtttcaccatgttggtcaggctggtctcgaactcctgacctccggtgatccacctgccttggcctcccaaagtactgggattacaggtgtgagccactgcgcttggcctaaggtttccttttaaaatacaatttttttaataacatagagacggggtttcaccgtggtgcccaggctggtcttgaactcctagattcaagcagttcacctactttggcctcccaaaatgctgggattacaggcataagccactgtgcctggcccatcataaggttttctttcaaacaaaatcagaagtaaaatgttattgatttgttactgccaggaactcaacatgcaccctgcgatgctgttgaactaaagtctgctaactgtggcttacaaataattgaagcaccagctaatactatttaaatccttaactagtgaaataaagagttatgaattcctaaaaggccaatatttatttttttgtagtgacagggtcttgctgtgttgcccagtctggtctagaactcctggcctcaagtgttcctcctgccttggcctcacaaatattgggattacagccatgagccaccatgcccggccctcattccattaggcttatataaatataatgattcgtgttaaacattttgtgtttaggatgggcacagtggctcacacctacaatcccagtactttgggaagctgaggcaggaggattacttgaccccagtagttggagaccaactggacaacatagcaagaccctgtctctaaaaaaaaaaaaaatacaaaaattagccacatggcccagcgtggtggctcacacctgtaatcccagcactttgggaggctgaggcaggcagatcacttgaggtcaggagttcaagacaagcctggccaacatggtgaaatgcggtctctactaaaaatacaaaaattagctgggcatgttggtgcatgcctgtaatcccagctacttgggagggtgaggcaggagaatcgcttgaacctggaaggtggaggttgcagcactacactccagcctgggcaacagagtgagactctgtccaaaaaaaaaaaaaaaaaaattagccaggtatggtggcatatgcctgtagtcccagctacttgggaggctgaggtgggaggatcgcttgagtctaggaggtcaaggctgcagtgagttataattgcaccatagcattccagctgagaccctgttcctccatcagaaaaaaaaggaaagaaagatttttaaaaatttaaaaattgtgcttaagaagacatctcaatggttgcacaatcttaatgtatttaatactacttaactgtatgtttaaaaatagttaaaatctgtaatcccagtgctttgagaggctgaggcagaaggattacttgagcccaggagttccagaccagcctggaaaacatggcaaaaacccatatctggagaaaacaaaaatacaaaacaaaaaatacaaaacaaaacaacccatggcgaaaacaaaaaaatacaaaaattagccaggtatggtggcacacacctgtagtcctagctacttgggaggctgaggcaggaggattgtctgagtccaggaggttgaggctacagtgagtcatgattgtgccactacactccagcctgggcaacagagcaagaccctgtctcaaaataaataaataaataaatagtttaaaatcgactagcttgggcaacatggaaaaactctgtttctacaaaaaaataaaacacacacacacacacacacacacacacacacacacgaaattaacaggtcgtggtggcacacacctataattccagctaaccaggaggctgaggtgggaggatcacctgagcccaagaaatcaaggttcctatgatcatgctactactgcacttcagcctggtcagcagagagagagatcgtgtctcaaaaaaaaaaaaaaagttaaaaaggttaaatagtaaattttatgttatatgtactttataagtttttttaaaaaataaacaatttttaattaaaaaatgtaactgatggccaggcatggtggctcacgcctataatctcagcactttgggaggccgaggcaggcggatcatgagtcaggagatcaagaccatcctggctcacactgtgaaaccccgtctctactaaaaacacaaaaaattagctgggcgtggtggcaggcgcctgtagtcccagctacttgggaggctgagacaggagaatcccttgaacctgggagacagaggttgcagtgagcagagatcgcgccactgcactccagcctgggtgacagagcaagactctgtctaaaaaaaaaaaaatgcaactgacttatttatatggactatatatcccataacctttctaaactcccttattagttctaaactcccatattagcttttttttttttttggtacatgccttaggattttctatgtacaattatgtcttctgtaaataatagttttatttcttcctttcaaaaataaaaatagaaagacatctctacattaacaaaggcaccagagtatacattttctttttctgtatcctcaatagcttctagataggccatgaaggagaaacagtgctacacagaggtcaattcagattaggaaagataagattaaaattactttgattcaaacacatgagaacagtttaggaatgactatgcttcaacatgtgattaacagccatatatcactcctgagatagggaggaactatggcagagggaagcagggaagtgcacacaagtttgtttccttggtttatcagctccttatttgagcacagagtgattcaaccagcgagcactgcttcaacctgtttggtcttggtctatctagaaaactcactggcagacttgtttctatcgctaacttacagttgggcttgaagcaagcaagggaagagttctcagaatagtcacggactggcccagacagccagcgactgtctgagacctgctgggccctagggacaatcaccgaagtcgggagaggtaagaagccagagggggccgggcgtggttgcccacgcctataatcccagcactttgggaggctgaggtgggtggatcacttgaggccaggtgttcgagaccagcctggccaacttggtgaaaccctgtctctactaaaaaaacaaaaatcagccgggcgtggtggcaggcacctgtaatcccagctactagggaggctgaggcaggagaatcacttgaatctgggaagccgaggttgcagtgagccgagatcgtgccactgcactccagtctgggcgacagagtgagaccccgtcttcaaaaagaaaaaaaggaagccagaggggcaggccagccagggctcagaaaacaagagctccaaaactagcaaacgaaacacttttcattagtgcaaagtgttaaggacttaaaatatccttaaaaagctatatcttctctctcttttttttcccatttctttttagagatcgggcctcactctgtcacccaggctagggtgcagtggcataatcatagcccactgcggcctcgaactcctggaaatatttggaactataggcaggggccaccatgcgtgtgtttttttgggcttttttttttttttttttttttttggtagagacagggtcttcctatgttgcccaggctggtttcaaactcctggtcccaagggatcctgccatcttggccttgggagtccaagggattatacgcatataatcccaaatcctgggattatacacatgtgccactgtgcccagcctcctgtcttcaattagagtgtgaaattactattctgagaactttacagtgttgatttttttttttttttgaggcagtctctctctgtcgcccaggctggagtgcagtggcgccatctcggctcactgcaaactctgcctccccggctcaagccattctcctgcctcagcctcccgagtcgctgggactacaggcacccaccaccacgcccggctaattttttgtatttttagtagagacggggtttcacggtgttagccaggatggtctcgatcccctgacctcatgatccgcctgcctcagcctcccaaagtgctgggattacaggcgtgagccaccgcacccggcctacagtgttgatttaacaaaccaaatgatagtaggaaactaaaatcatgtcaaatgttaatgcttaataacaatatcctaaatagtttttaatttaaaaatttgcctagcactgtgttactaacctgtagtcctacctactactaggaggctgaggcaagagaattgcttcagccccaggagttcaaggttgcagtgagctatgatcatgccactacactccagtctgggcaacagagagactctgtttctacaaaaataaataaataagtaataaatatcaattaaatcaaaatggactaaaattctcaacatacatataaaaataatggaagcaggccaggcgtagtggctcacgcctgtaatcccagcactttgggaggccaagatgggcggatcacctaaggtcaggagttcaagaccagcctggccaacatggcaaaaccctgtctctactaaaaatacaaaaattatctgggtgtggtggcaggtgcctgtaatcccacctactctggaggctgaggcaggagaatcgcttgaacctgggaggaggaggttgtagtgagctgagattgcaccattgcactccagcctgggcgacaagagcaagactccatctcaaaaaataataataataaaataaataatggaagatgtaggaataaaggaataataacttaatcccagatacttaaaaaaatcaatttacaaaatataataacatattaaaactttatgtaagaaatatattttaccatattagaaaatatttcaggctggggacagtggctcatgcctgtaatcccagcactttgggaggccaacatgggaggatcgcttgaggctaggcgttcaagaccagcctgggcaacatatcaagaccccgactctattacattttaaaaaaatattttaagttttggtcaggcacggtgtctcaagcctgtaatcccagcactttgggaggctgaggcgggtggatcacttgaggtcaggagttggagaccagcctggccaacatggtgaaacgcccatctctactaaaaaaacaaaaattagccgggcatggttgtaggcgcctgtaatctcagttactcaggaggctggggcaggagaattgctggaacccaggaggtggaggctgcaatgagccgagatcacgccattgcactccagcctgggtgacaagagcaaaactccatctcaaaagaagaaaaaaaaaggtatttgtgaaagcatagaagcacaaatggttggaatagcaggatcttttcttttcttttcttttttgagacagggtctcgctctgtcacccaggcgggagtgcagcggcaagagcttagctcactgcaacctatgcctcctgagtccaagcaatccacccacttcagcctcccgagtagctaagactacaggcacatgacaccatgcccggctaatttttgttctttatatagaagcgggatttcaccattgcccaggctagtttcgaactcctggactcaagtgatctgaccacctcagcctcccaaaatgctgggattataggcgtgagccactgcgccagcccaacagcaggatcttagaaaggatctctgacaaaaggcccaacataaatatataattggttaaatagaaatcatgtttaagaaggaaaaaaaatatgtgtaattttcctaataaaaggaaaatacagaccatgcacataatactaatactattatttgtaaatgattcaaatacatttttgaaaaagagaaggatctgagtttcctcattcacgatacggtgagttaaactagacttgtgtgcttataatgggccataggtgtgctggatcgggacccttccgctctggctggagcctgcaggcagcccatcctgcagcaagctgcttcttcccttcccttttcttggggtgttggataacttcttcattttctatgtgaaccctctgcaagaaagcccgggaagcctacttaagaaatgagctccaggtcctgcttaggtctagcatgtgtcactgtacctctaataaatcatcatgatgcactgtagcaacaagacaaacagacagaacctccatgttgcacaaaaggtaatgaaaatgacagaaatggccgggcgcagtgggtcacgcctgtaatcccagaactttgggaggctgaggcagggagatcacaaggtcaggaaatcaagaacatcctggccaacatggtggaaccccatctctactaaaaatacaaaaattagctgggcatggtggcgggtgcctgtagtcccagctacttgggaggctgaggtaggagaaacgctttaacccaggaggcggaggttgcagtgagctgagatcgtgccactgcactccagcctggtgacagagcaagactccatcttaaaaaaaaaaaatgacagaaatacccctattcttctaatagctacatttctgtaagttaaatacttcaaaaaagttagggctgggcgaggtggctcacacctgtaatcccagcactttgggaggctgaggcgggcggatcacgaggtcaggagatcgagaccatcctggctaacacggtgaaaccccgtctctactaaaaatacaaaaattagctgggcgcggtggcgggcgcctgtagtcccagctactcgggaggctgaggcaggagaatggcgtgaacccgggaggtggagcttgcagtgagccaagatcgtgccactgcactccagcctgggcgacagagcaagactccgtctcaaaaaaaaaaaaaaaagttggatggggtcttgctatgttgcccaggctggcacttttctgtctttctttcctttttttttttttttagacagagtctcactctgtcatccaggctggagtgcagtggtgcaatcttggcccactgcaacctctgcctcccaggatcacataattctcatgcctcagcctccctaggattagaggtgtgcaccactatcaccagctaatttttgtatttttaatagagacaggatttcaccatgttggccaggctggtctcaaactactcgaacaagtaatcttcccacctcggcctcctaaagtgccaggattacaggtgtgagccaccttgcccggcctcaaatttatgtttggaataagttttccatttaaaagcaactgtgggccgggtgtggtagttcatggctgtagtcccagcactttgggaggccgaggttggcggatcacctgaggtcaggagtttgagaccagcttggccaacatggtgaaacttcatctctactaaaatacaaaaattagctgggtatggtggtgcgcacctgtaatcccagctacttgggaggctgaggcaggagaatcgcttgaacctgggaggcatagctgaatcctgaacatgtaacttcaatctgatcagttatgtatcttttcaatgctcttcaataaaagaaagaaaaagactcaattaagcatattgtagagcagtgcttcttaaacttgaatatgtgtacaaacaacccaggaacctcctaaaaatgtagatttagattcagtaggtctgcatgtagtggggcgtgagacggtatgtttttcttttcctttttgtaaaaatagagacaggatctctgtcacccaggctggggtacagtggctcgaccttggctcaccgcaatctccgcctcccgggctcaagttatcctcccacctcagcctccccagtagctgggaccacaggtgtgtgccaccatatccagctaatttttgcattttttatatttttatattttttgtagggtttctccatgttgcccaggctggtcttgaactcctggtctcaagcgatcagacttggcctcccaaagtgctgggattacaggcttgagccactgcacctggccttgcttttcctttttttgagacagggtctggctctgtcccccaggctagaatgcagtgacgccatcatggcttactgcagtctcagcctcctaggtttaaggggtccttccacctcagcctctgagtagctgggactacagacgtgcaccaacacacctggctgattttttttttttttggtagagatgggggtctccccatattgcccaggctggtctcaaactcctgggctcaagcgatccgctcacctcagcctcccaaagtgctgggattacaggtgtgagtcactgcacccggctgaaatggtatattttaagcaagctcccaggttgtccagaaccacacagtgaagagcatggctacagaacggtggttctcacactttcggtgcatgagaatcactgggagggcttgttaaaccagatcgttgggcccacccccagggtttctgacttagaaggtctggggtggcatatgatattctgcatttctaacaagtttctccatgatactgatgttgcctgtccggggaccacacttggagatccactgctgccaaggaaagcatattagattgtgagagtcaaaacccgggttactaactggccctatgactctatcaggtagaaatgcattcaacagaacaaccaattaacagtagcttaaacaaataatagtttgtttttctcatttgttaaatccagaggtgggcagtccaggtctggggtgcttcttagaaagtcagcaagaacacgtggtctttctttctttctgctccaccatcactaacgtggcttttgcgttcataggcacaagatggctgtggaaccaagttcctagcagaaagaagggagcagagactgggcatggtggctcacacctggaatcccagcagtttgggagatggaggcaggataattacttgagcccaggagtttgagaccagcctgggcaatgtggtgaaacctggtctctacagaaaaaaacacaaaaattagctgggaggcatgcacctgtagtcccagctacttgggaggctgaggtgggaggatcacctgagcccgggaggttgaggctgcaatgagccgagatcatgccactgcactccagcctgggtgatggagtgagaccctgttaaaaaagaaaaaaaaaaaaggaaggagggagggagggaacgagagagagagagaggaagaaggaaggaagggagggagggagggagggaggaaggaaggtaggtaggaaggagcagagccaatggggaaggagcatccagcttcacttgcccttttgagaaagtttacccaggagccctgctccatgacttctgcttacatctcgttggcctgaactgtggcaaacacagaccaatcactgggcggcaactagggtgaaagggtgagacttgctgcttgacactgtctgccacagggacctctgatgtagacacaaaatcttaagccatgcatagtagcacgcatttgtagtcccagctacttggaagactgaggcaggaagattgtgtgagtccaagaattggaggccagcctgggcaacagagcgagaccctctctctctgtctctctctctttgaaacagagtcttgttttgtcacccaggctggtgtgcagtggtgcaaagactgcagcctcggcctcctggcctcaagcgatcctcccacttaggcctcccaaagtgctgggattagaggtgttagccaccatgcccaagacaaggtcttgctctgttgcccaggctgcagtgtggtgggatgatctcatctcactgcagtgaccctatctcttaaacaaaaaaatcttaatataatttcaatgctacagaagctcccaaaagtaggcacgtacctcagctctgtgaccctcagtctgcttatccataaaatgtatgagatgcatgactggcattttgcgtaggacaattcatcagcgtgtggagctctcctgtgcatcgcagagtgtttagcctctctaatctctaggtaccaaatgccagtatcacccacccacagcattgtgataaaaccaaaggcctctgtgggtttgcaaataccttctggttgggtggggtatgggaggggaccaccttcctgggctggaaaccaccatactttttttttttttctgtcacccaggctggagtgcaatagtgtgatcgtagttcactgcagcctcaaactcctgggctcaagcaatcctcccacctcagcctttggagtagctagaagtacaggcacacaacaccatgctcatctaatttttaggtttttttaagagacggcggtttcattgtgttgcccaggctgtagcctcttttataaaggttagaggtttttctgttttgttctgttttttttaactttctctgttgccaggctgaagtgcaatggcacaatcttggctcactgcaacctccacctcccaggttcaagcgattctcctgcctcagcctcccaagtagctgggattacaggtgcatgccatcacatccgtctgatttttgtatttttagtagaagcaggatttcgttatgttggttaggctggtctcgaacccctgacctcaagtgatcctcctgcctcagcctcccaaagtgctgggattacagcagtgagccactgcacctggcctctatctactattgttccaatgatctaatgacttcaaaatcactcctccatatttccagaagaccttcctctccacattgggtggcggggcaggggggggggggggtctcactctcatcccaggtgacttttattacgttggtgcaaaagtagttgcagtttttgccattacctttattttattttatttatttatttattttttgagacggagtctcgcactgttgcccgggctagagtgcagtggcacaatctcagttcactgcaacctctgcctcctaggttcaagcaattctcccgcctcagcctcccaagtagctgggattacaggcatctgctaccacgcccggctaattttttgtatttttagtagagatggggtttccctatgtaggccaggctgttctccagtgcctgacctcatgatccacctgagatcatgctgggattacaggcgtgagccaccgcgaccggcctatttttttattttttatctatttattttttgagacagagtctcactctgctacctaggctagagcgctatggctccatcttggctcagtgcaacctctgcctcccaggttcaggtgattctcctgcctaagcctcctgagtagctggaattacaggtgcccaccgccacatctcgctaatttttgtatttttagtagagacgggtttcatcatgtttgttggccaggctggtttcaaacccctgacctcaggggatctgcccaccttggcctcccaaagtactgggaatacagacgtgagctgccgcacccggctgccattacctttaatggcaaaaagcacaattacttttgcatcaacctaatatgtccatctggatggtcctggctggactggcagttcccctttaccaacaccctttacctcttctctatttcacttgcccacacagtggccagagcccagcacttgccatccatgaactattccttaaccttaaacttcactagctctggccgggcatggtggctgtaaccccagcactttgggaggccaacgcgggcagatcacttgaggtcaggagttcgagaccagcctggccagcatggtgaaaccccgtctctactaaaaatacaaaaattagccaggcgtgatggtgcatgcctgtagtcccagctactctggaggctgaggcaggagaattgctagaacccaagaggcagaggttgcagtgagctgagatcatgccattgcactccagcctgggcaacagagcaaggttctgtctttaaaaaaaaaaaaaaaacttcagtgggtcatccgtggttcatcccttcctgcatctccactttctcattcccttggtctcattcttcttccctgtgtttattcaccctcctcagctatcagccccattctagcttcacattcttcttcctgcagcctggatatgctgatccatgcttcttccattcccctgatcctcccctcatcctcctgggagaaccccagccctggttccagctgactttctgccctcttatcccacacttggcagctgagcactgatggaggcagtgcacacccaagcaggtggttgccatgacaacccggtggtctctggccactccactcctgggctgggagctcttctgggctgtccttgtcagtcctttctgtttcctacctttatcctcctcccttctcattgtaactctcgacagataacttcactcctacttgtaggtgaaaatagaagccatcaggcagaagcccccctcaattcctgccccccactcccaccccactgaaacatttatttttatccactcttattctttcctcccttttattgtgggaaaggtttccttcctgtacttaatccctccacctgagccctgcatcccagtagttcagcctcctcagggaccttggctctcaaaatcgcctctctgcccttgcagtattttaacatgttagcctctcttctctcctaaaaagccaggttccccagacactacaagtctccctttctctcttttctcttggagcaagggttcctaaccttttttaactgtggattccttcggcagtctggtgggggtttttttgttttttttttttgttttttgaggcggagtctcgctctgtcacccaggctggagtgcagtggcgcaacctctgccttcccggttcaagcaatcctcctgcctccgcctcccaagtagctgggattacagatgcccaccaccacgcccagctaatttttttgtatttttagtacaaaaataccatgttggccaggctggtctcgaaactcctgacctcaggtgatccgcctgcctcagcctcccaaagtgctgggattataggcatgggccaccgccccggtgttttttgaatacataaaatgatacacatagaattaccacaggaaccaattatatacaatatgttgttacaatatttttaagttgcctgaataatttttgacatagttatacattttcttttattttgtgtcctttattaatgcattcaataacgagatcttgaagtgggcctaataacttctgtatttaatttttttttttagagacaaggtctcactctgttgcccaggctagagtgcaatggcacgatcatagcttactgtaacttcaaactcctgggctcaagcaatcctcctgccttagcctcccaaagtgctggaactataggcatgtgccaccatgcctggctaatttttatttatttatttatttttttgtagagagagggggtctgcatgttgcccaggctggtctcaaactcctgggctcaattgatcctctcaccttggcatcccaaaatgctgggattacaggtgtgagccatcacacccagcaatttctgtatttttaaaatattgataattataagcaatattttgctacagctgcatcaaaaaactttttttcactagctgagcatggcagcatgtgcctgtagttccagctactcagtaggctgaggtgggaggattgcttgcgcctgagaggttgaggttccagtgcatggtgattatatcactgtacttcagcctgggcaacagagcgagaccctgaaccctccaaaaaaaagtgtatactcaccgaccacttccttatcttccacacatctcaattttatgatttctcaaacatccctttgtgccaactgtgtataaggttaagcagtgattgttttggcagcacatatactaaaattggaatgatacagagattagcaaaattaaattaaaaattcaaaaatacaaaaaggataagtaaccttttgcaatctagtttttactccatggcccagggccactagtcttcccaaaggttccaatggtcccttgaatttttttattttattttatttttttgagacagagtctcactctgttgcccaggctggagtgcaagtgccattcactcagctcactgccacctctgcctcccaacctcaagcaattctcctccatcagccttcaagtagctgggattacaggtgcgcaccaccatgcctggctaatttttgtatttttagtagagatggggtttcaccatgttggccaggctggtctcaaactcctgacctcaaatagtccatccacttaggcctcccaaagtgcaggctgggattacaggcacgagccaccgtgcctgggcccttgaatttaaagcacattttctggccgggtgtggtggctcacgcctgtaatcccagcgctttgggaggctgaggtgggtggatcacgaggtcaggagatttagaccatcctggctaacatggtgaaaccctgtctctactaaaaaatacaaaaaaattaactgggcatggtggcgggtgcctgtagtcccagctacttgggaggctgaggcaggagaatggtgtgaacccgggaggtggaacttgcagtgagcctagatcgcgccactgcactccagcctgggtgacagaacaagactccgtcttgaaaataaataaataaataaaaaataaagcacattttcttttctttttttttgagacagttttgctcctgttgctcaggttggagtgcaatggcgcaatctcagtttacctcacaccacctccatctcccgggttcaagtgattctcctgcctcagcctcctgagtaactgggactacaggtatgcgccaccatgcctggctaattttgtatttttagtagagatgggggtttctccatgttgtttaggctggtctcgaacttctgatctcaggtgatccacccgcttcagcctcccaaagtgctgggattacaggtgtgagccaccacgcctggcttttcttttctttttttttttaataggcatgtttcagagctcagtttgattacgtaacatctagcatgagtgactccattctggtttggtctggatcgctagggcctaggacaggaggctagtctaaagcaatggactcctgtaaattgtatttaacagcatgaataggatcttccacggagaatatgtggtctgggaacatcctagattggaagaggactagactacaacctgacagtgaatggcaaagaaaaatgaaggagccagcaaaaaaagcagaaagaaaactggcgtgtgtcagtatggtttcattgcctaccccttcatttgggacaaagcctcgatttcgttttgcattccacccttcctccaagtggttcagcaatgagtcctgattaatccaagccaatcactgttatcacaattccctgccagggactgatttaggaaggggcatataatacaatacaggccagtgagatgtgaggataaagacttctgggggcttctggggaaggtctcctcattggttaaaaataaagagacatatgggaaaagacacactctctagctgcattttttcatgttgggatatagcattggaatgacttgtattagggttttccagagaaacagaaccagtaggttctagatatagatatacagatagatatttatatatgaggagatttataggaattggctcatgtggttatagaggccaggaagacccatgatatgctctctgcaagctggagaacctggaaagccagtgtgtaattctgtctgagtccaaacgccaggtaatcagctgagggccaatgatgtgggtcccactctgagtttggaagcccaagtccgagggtaggaggaaatgggtgtctcagcgcaagcagagagagggagttcacccttgctcgatccttttgttctattcaggcctttaatgaattgggtgatgcctacccacactgggagagccatctgcttcactcagttcatcagctcaaatgagaatcccttccagaaacaccctcacagacacagccagaaataatgttttaccggttatctgggcatcccttagcccagtcaagtaatacacccaattaaccatcacacactgctgcagtcatcctcgaacagtgcagagagcacctttaggacaagccatcgtcttcagggtggtagatcagaatggtggacggtagctgggagcaacagctcatgcatgtaatcccagcactttgggaggccaaggcaggcagattgcttgatcccaggagttcaagactagtctgggtgacatggtgaaaccctgtctctaccaaaaaaaaaaaaaaaacaaaaaaattagctgggcatggtggtgcatgcctgtactcccagctacttgggaggctgaggcaggaggatcatttgagcccagacgtcgaggctgtggcgggccaaaatcatgccactgtactccagcctgggtgatagagtgagaccctatctcaaaaaaaaaaaaaaaaaaaaaaaaaggtggaaggcacccaagtccctgatgacactgctgagccttcaaattaatcagccctgaagctcttcaaatgtgaggtatatttttcctatggttcaagctacttgacttggattcttttttttttatttgcagctaaaggcacagccatagagaagaatactgcaagagcctaggcggcagaaagctccaaagaggaaacgagttggcatctgaggctgcagggaaatggagtcatatggagacagaaaaaggtactttaggctgggtgtggtggtgcatgcctgtaatcctagctacttgggaggctgaggcaggagaatcgcttgaacccaggaggcagaggttgcagtgagccgagatcgcaccactgcaccgtgccagcctgggcaacaagagtgaaacttcatctcaaaaaaaaaaaaaaaagaaagaaaaaaaggccaggcacagtggctcatgcctgtaatcccagcactttgagggccaaggcaggaggatcacttgagatcaggagtttgagaccagcctggccaacatggtgaaacctggtttctactaaaaatacaaaaattacctgggcatggtggtgcgcgctggtaatcccagctactcgagagactgaggcaggagaatcgcttgaacctgggaggcggagtttgcagtgaggcaagatcatgccatagcactccaacctgggtggtagagcgagactctgtctcaaaaaaaaaaaaaattaaattaaataaattttaaaaaaccacaccacgagattcacagcacccaatctaaagagctcagtttacctgttgccatgataatgaggccccctctgtttcaatcctgtaaggaaatcgctttgaaacaaccaatccactttttgttctctgtttctgctttcctcagtccttttctgtctataaaaccaatcttttggatgttcagctgcctgtttggggtgacggactttccatcctagaaccacggcctaatttgtccgtaacctcacagaggtgactctggcgctagtgaacaatgctgctgtgacttatgtgaaacctcaactggccacattttggtactatgccaaagttgagctggttcctccacccctgttgagatccctagagctatccaaagcctgggggaaaaaaataagtcactagtgctcaaactggtagcttcaaaccgctcacagttaaggaagtggtgctgaatgatttggtggccactgaggtgtgaatgtggttttatgttggagagatcacaggcaagtgtggcatgattggctataatatttgaagaacaagactagtgaacaatacagtcaggatggctaaaggtgaccccaagaaaccaaagggcaagatgtctgcttatgccttctttgtgcagacgtgcagagaagaacataagaagaaaaacccaaaagtccccatcaattttgcagaattttccaaaaagtgctctgagaggtggaagacaatgtccaagaaagagaaatctaaattcaatgaactggcaaaggcggataaagtgcactatgatcaggaaattaaggattatggaccagctaaaggaggcaagaagaaggatcctaatgcccccaaaaggccaccgtctggattcttcctgttctgttcagaattctgccccaagagcaaatccacaaaccccggcatccctattggagacgtggcaaaaaagctgggtgagatgtggaagaacttaaatgacagtgaaaagcagccttacatcactcaggcggcaaagctgaaggaaaagtatgagaaggatgttgctgtctataagtcgaaaggaaagtctgatggcgcaaagggtcctgctaaagttgcccagaaaaaggtggaagaggaagatgaagacgaggagttctgtattctacactcggtgctaactttttggtatgtctattgccttcacaaaaccatatgactttggtttgctatctctattttctgagcttaaaatagtgtgcaaggccgggcgtggtggctcacacctgtaatcccaacactttgggaggccgaggcaggtggattacctgaggtcaggagtttgagaccagcctggccaacatggagaaaccgtgtctctactagaaatacaaaattaaccgggcgttgtggctcatgcctgtagtctcagctactggggaggctgaggcaggagaatcgcttgaacctgggaggcggaggttgcagtgaaccgatcgtgccgttgcactccagcctgggcaacaagagtgaaactccgtctcaaaacaaaacaaaacaaaacaaaacagtgtgcaaacttgcaggtgtacccactgaacctagaataagagttggaaagaaaaaaatatatatatggcaaataaatctataaagaaaaggggccgggcgcggtggctcacaccggtaatcccagcactttgggaggctgaggtgggcggatcacaaggttaggagaccgagaccatcctggctaacacggtgaaaccccatctctactaaaaatacaaaaaattagctgggcgtggtggtgggcgcctgtagttccagctacttgggaggctgaggcaggagaatggcgtgaactgaaggagtggagtttgcagtgagccgacatcgcgccactgcactccagcttgggcgatagagcaaggctccatctcaaaaaaaaaaaaaaaaactatcaagaaaaaaattccagtgttccagcctagtatagatgcataataaaaaaagaataatcaaatgatctacaaacaggattacttttaggcttattttctttttcctgttccttgagaaaacaatacagaaacagggctgggcgcggtggctcaagcctgtaatcccagcactttgggaggccaagacgggcggatcacaaggtcaggagatcgagaccatcctggctaacacggtgaaaccccgtctctactaaaaacacaaaaaattagccaggcgcggtggcagcggctgtagtcccagctactcaggaggctgaggcaggagaatagtgtgaacccgggaggcggagcttgcagtgagccgagatcgcgccactgcactctagcctgggcgacagagcaagactccctctccgaaaaaaaaaaaacaaaaacaactacagaaacatcccattttgttctatttcacaactaaaatatgaatttagtacaactcccttcacataaagagcgtcggctctttgccatcattgttttaatttttccttttcttttttgttttattttgttttgtttttgagacggagtcttgctctgtgcccaggctggagtgcagtggcacaatctcggctcactgcaacctccacctccctggttcaagcaattcccctgcctcagcctcctgagtagctgggattacaggcgcacgccaccatgtctggctaatttttttttgttgttgttgtatttttagtagagatggggtttcaccatgttggccagactggtcttgaactcctaacctcaggcaatctgcccgcctcggcctcccaaagtgctgggattacagacgtgagccattgcgcctggcccccttttctttatttcgaaagttaaacttcccagggtcataagattccagtctcatgactggaagaagctctaattagctgctcttcttcccagtccctgccacagcctcattccgccacctcacacttctacttcctcaccttgacaagatacctgtgctcctgacatactgcaggctaggcattcaggaaaggtcagaatgaaagtgcatcccaaaacatgttttattccacctgggatgtccaagaaaggctctggacatttaacaaacttgttagtttacaaatgctacgtttattatcagaggccaaccaaggcctcagactaaggaacagcacatcccactgcattatcacaaccaggaccagagaacttgcagccaagccaattaaagtcaacattcaacaatcaagccatgggtacatgaccttgaggccctggatgtgaaacctatgagaaggaccatgaccctgggctttctgctgaacctcatgaaagttcgatcttaaactgaatctgtgggatcataagcacttgggtgttcaagaccagcctgggcaactcccgtctctacaaaaaaaaaacaaaaaaaaaaaacgccaggtgaggtggctcatggttgtaatcccagcactttgggaggccaaggcaggaggatcacctgaggtcaggagttcaagaccagcctggccaacatgatgaaacttcgtctatactaaaaatacaaaattagccgggcatggtggctggcatctgtaatcccagctacttgagaggctgaggtgggaaaattgcttgaacttgagacgggggtgttgcagtgagccgagatcgtgccactgcactcccgcctgggtgacagagtgatactctgtctcaaaaacaaagaaataaacaaaaattagccaatatggtggtatgtgtctgtagtcccagcttctcaggaggttgaggtgggaggatcaattgagcccaggacccaggaggtcaaggctgcagtgagccatgattgtgccagtgcactccagcctgggtgacagagcaagaccttgtctcaaaaaaaaaaaatctttcatctgcagcagcagccaagctatatacttcagttccgattgcatctagtgataataacagtggctaatatttgttaagtgcttactatgagtcagtcactgtgctaggtgctcatgcatcatctcatttaacccatattgattggaaggcataccctgctaatgactgggagagctacggtcagttctgcgagtgcatttcaatttccaacccatttctacaagaccagaaagagaggagcctcctgtgtgttagagatggcttctgagaggaagtgtgccgtgcaactcctccaactcagagtcatgttttctttttttttttttaatttgagatggagtttcactcttgttgcccaagctagagtgcaatggcacgatctcagctcaccgcaacctccacctcccaggttcaagtgattctccttcctcagcctcccgagtagctgggattacaggcatgtgccaccatgcccagctaatttttttttttttttttttgagacggagtctcgctgtcgcccaggctggagtgcagtggcgcaatctcggctcattgcaggctccgccccccggggttcacgccattctcctgcctcagcctccgaattagcttggactacaggcgcctgccacctcgcccggctaattttttgtatttttagtagagacagggtttcactgtgttagccaggatggtctcgatctcctgacctcgtgatccgcccgcctcggcctcccaaagtgctgggattacaggcgtgagccaccgcgcctggccgaccagctaattttttgtgtttttagtagagacagggtttctccagttggtcaggctggtctcgaactcccaacctcaggtgatccacgtgcctcggcctcccgaagtgcatgagccaccgcacccggccaaattcacgttttctaacctgcttgcctacaacctgggatttgaagaaagttttccaacttttgggagacttcaactcatccttcaacttctgggagactatatgtttgagtaaggcactgttacgaatcacaagaaaaggagaaacttaattccccggtttcccgagtgtttatgaactaattatcattgttattattgctttatttaatttaattaatttattttttgagacggagtttcgctcttgttgcccaggctggactgcaatggcacggtcttggctcactgcaacctttgcctcccgggttcaagcgattctcctgtctcatcctcccaagtagctgggattacaggccaccatcacatgtccagctaatttttgtatttttagtagagatagggtttcatcacattggccaggctggtctcgaactcctgacctcaggtgatccatccacctcggcctcccaaagtgctgggataacaggcgtgagccaccgcacccggcctattttatttttttgagacggagtcttactctgtcgctcaggctggagtgcggtgacgagatctcggctcactacaacctctgcctcccaggttcaagcgattctcctgactcagcctcccaagcagctgtaactacaggcatgtgccaccacccggctcatttttgtctttttagtagagacgggggtttcaccatgttagccaggctggtctcgaactcccgacctcaagtgatccgcccgcctcggcctcccaaagtgctgggattacaggcgtgagcccccatacccggctaattattattattatttttagagatgggggtctcgctatgttgcccagtctgggctcaaactcttctgctcaaccaatcctctcgcctgggcctcccaagtacctgggactacaagatggcgccaccgcgcccggcattagcttactatgtaaaagccctaccagactcacgtggccgggggtcagtttattctcatctcttgaagccatgcgcttcacctgggccgactgggagacagtcctggcaaagcctctgaaaacagccagcccctaaggagcggttctgttgggggaagggagcctcaaggctaacgaaggagctcccaccctacccttcaacttcagagggagaaaagaacccttccctgaaagggcgagactactgggtcctcttgggggacgctggagatcctcccgaccagagctggaggaagctgagaggctctgcggggtgcggggagggaaactgagccgaggccgggtagagggcgggcgtggggcgagccagagacttctcaagaagcccagaggattctggggactggaaagcggccgagttctttaaaaaaaaagagagagagagagaagaaaacaaaatctctcgtctgagcatgactcttggcggtggtgctttcgccagcgcgtctgcagcggttcccagagaaagcccgccaggcagggacagactgacagaccgacggaaaggtcttcccagcgaagacttggaacgccccagggggtgggggaggctgcaccgcctcttcagtaattggtttggagacaattggccatccatacggaaaagataaagtagatcctatctgacggcaggcctccaaataaattccagatgaactagagacctacagggaacaagcaacgctattacagagctttgggaagaaaacggaaagatagctgtatgacactgggataggggatgttttctctaacaaagtataaaacgtgcaaaacataaaggaaaagatggtatggaccgggcgcagggactcacgcctgtaaccccagcactttgggcggcggaggagggaggaccgcttgagcccgggagtttttgtttttgtttttgttttcttgagacaaggcatcttgctcttgcccaggctggagtgcagtggcagcgggatctctgctcactgcaacctccgcctcccaaggagctgggtggggctaaaggcaccaccaccacacttggctaattaaaacaattttttttgcagagatgaggtctcactatactgcccaggctggtctcaaactcctggcctcaaacgattctcccgcctcggcctcccaaagtgctgggattacaggctgttccactgtgcccaggaagcccaggagtccgagatgagcctgggcaacacagcgagactcccatctctatttttttttttaaagatggtatggtgttatgatacatattggttttcgtccacagctcctggctcatgactctcatagtccttgttagtcttttgttataatattgagtgtgttagccctcaggggcagtatctgaccttctcctgcactcctttcactctaaccttcctgggcctttctgactgtgggccttaagaccctcccataaagcttccatgaaaacccaagaggacagggttcagtgagcttccagatgcctgaacacctggaggttcctggagggtggagcacccagagagggcatggaagctccacacccctgccctcataccttaccctccgtgtctcttcatctgtatcctttgcgatatgctggctttttttttttttttttcaaatggaatcttgctctttcacccaggctggagtgcagtggcgccatctcggcccactgcaacctccacctctagggttcaagcgattctcattgccttagcctcccttgtagctgggattacagacacccaccaaccacacctggctaatttttttttttttagtagagacggtttcaccatgttggccaggctggtctcgaagtcctgacctcaagcgatgcacttgccttggcctcccaaagtgcttggattataggcatgagccaccacactaggcctgcaatatggtttctaataaaccagtaattgtcagtgtttccccgagttctgtgagctgctcccacaaatcaattggacccaaagagggggtcatgagaaccccaacttaaagcctgctggtcagaagttctggaggcccagacttgggactggtgcggggcagggaggcagtcttggggactaagccctcaacctatgaggtctgacactgtctctgggtagatggtgttagaactgaattaaaggacacccagctggtgtccactgctgggtggggaacaaaagccccatgtgtatggtcacagaaatctgtgtggatgattgctgtggtgtgagagtagaggaaatggttacagttttctctaaacaattggtgtcagtgaagtgggatttgcaggaatggccctgactcacataaacatgtggtttgggaagaaaaaggataaaagggtggaggaagaggtcgtcaattcctgggtgaccacgtggtcaccatggtgtgaagccacaactctgttgagatcagttactaaaggtaaaacttactagtggaatttagagatggatccaactcccaggaattggttcattgaatgcataaggaaatgcaaactaataagaaaaatgtgaaatattcagccccctgattattgttatctataatggctaaaatgaaagtaaaagagggtgctgggttaggaattgaggctggaccaagcacagatgtgggtctggctgagctcaggccactagcctcggagtcacccacaaaggaggaaattatgcagggacaacagaaagtacctctgagacctgtggttaccaagaaggtagtcaatgtgaaggaaccaagtaattatcgaaaccagacagtagagtgtggaggaattgttccatttcatagatcagtatcatcagcttcctgaggaacatttactaaaatggattctgagagtgactaatttaggggcagtatgcagagtggaagagcatgtttgggttgatgcaggactcacagttcaccattctagtcacagttgggtatatatgattcagacacacaggagattattcctgagggaacagccagcctggtggaatgtagaaaagtcactgtaaaggtcgggcatggtggctcacacctgtaatcccagcactttgggaggccgaggcgcgtggatcacctgaggtcaggagttcaagaccagccgggccaacatggtgaaaccctgtctctactaaaaatacaaaagttagccgggcgtggtggctcatgcctgtaatcccagctactcaagaggccaaggcaagagaatcacttgaacccgggaagtggaggttgcagtgagccaaaatcatgccagtgcactccagcctgggcaacagaaagagactctgtctcaaaaaaaaaattagctggcatggtggcatgtgcctgtggtcccagttactcaggaggctgaggtggaaggatcgcttgagcccaggattccaaggctgcataaaaagtctcagaggctgggtgcggtggcttacgcctgtaatcccaacatttggaagggatcacaaggtcaggagtttgagaccagcctggccaacatgatgaaaccccgtctctactaaaaatacaaaaattagcagggtatggtggagcgtgcctataatcccaggtacttgggaagctgaagcaggagaattgcttgaacctgggaggcagaggttgcactgagctgagatcaagccattgcactccagcctgggctacagagtgcgactacgtctcaaaaaaaaaaaaaaaaaaaaaaggctgggcgtggtggctcacgcctgtaatcccacagcactttgggaggccaaggcaggtggatcacatgaggtcgaccaacatggagaaaccccgtctctactaaaaatacaaaattagctgggcgtgatggtgcatgcctgtaatcctagctacttgggaggctgaggcaggagaatcgcttgaacccgggaggtggagcttgcggtgagttgagatcgagccattgcactccagcctgggcaacgagagcgaaactccatctaaaaaaaaaaaaaaaaaaagattgtaacttggctacttggctgagcatggtggctcatgcctgtaacccagcactttgggaggctgaggcaggtggattacctgagctcaggggttcgagaccagtccgggcaacatgacaaaacccctgtctctactgaaaatacaaaaaaattagccgggtgtggtggtgcacacctgtaatctcagctactagggaggctgagccaggagaatcgcttgaacctgagagaggcagaggttgtagtgagccgagatcatgccactgcactccaacctgggcaacagagtgagacttagtctcaaaaaaaaaaaaaaatcttaagtggcatttacagtgtttgtgattctagatcaggctacgtttcattccataaaataaatagaatgagtgttcagatgagtcaagcacaggttagtttttatggacaaaaaagggtagagaaaaatagaaacagaaggaaaaaaagcagatgggtcctttcaaagttacttttcttgtaaaaggacttccgtatcatgccggctcacactggcttgtttggggttttggctcttccttccctctcctgattcctctgaaggtttgataaacaacttagtgttgcttagtgacatagaactttagcgtgagtgactccattttggtttggtctgttgagccaagcacaggagctcagtgcaaatcaatggcctcctataaaatttatttaactgaacccttgtgcattgctggtgggaatttaaaatggtgcagctaccatggaaaatcgtatggcgattcctcagaacattaaacacaattaccatatgatccagcaattctacctctgggtgtatatccaaaataattgaaagcagggactcgaacagatatttgtacactcacattcaaagcagcaacattcacaatagccaaaaggtggaagcaacccaaatgtccatggagggatgaatggttatgcaaaatgtggtacatctatacaatggaatattattcagttgtaaaaaggaaggaaattctgacacatgctacgaaatggaaggatcttgaagatattatgttaagtgaaagaagccagacccaaaaagacaaatactgtataattccactcatatcaggtgcctagagtagtcaaggggaagttactgtttaatcgcgatagagtttcagtttgggaagataagaaagttctagaaaagaatggtggtggtggttacagaacaatgtgagtgtacttggtgccacagaactgtatgcagtacttacaaatggttacaatggtaaatttaggccaggagtggtggctcatgcctgtaatcccagcattttgggaggccaaggcaggaggattgattgaggccagtagtttaagaccatcttgggcaacacggtgagatccccatctctataaaaatacattttaaaaatttaaaaattagctgggcgtggtagcacacgcctgtagtcccagctactcgggagactgaagtgggaggatcacttaagccagaagttcaaggctacagtgagctatgatcgcgccactgcactccagcctgggcgacagagcgagacccttctaaaaaataaaaaggtaacatacatgtgtatgtattgtaacaccattaaaaaacagaaatttaaacgaagaaaagttggcttctagccctttgatctagcaaagctgacagtgtcctcacctaccaatataggtagatgactccttacacgtggacaagcacatccacctggccgcttctcccctttcctcccctcccccgttcctctcctccccaacacatccaggttccgaccctgccacccccaacgagtctcactgcgcaggcgcggagcggtgggcaggagcgggcgtggcctgactctgcgcctgtgcggaattccagctgcgactgctgagggagaaaatgatgcccaggttgggctccccggcccaccggccgaggagaggcctgcgctgcacacgcgcagaccgagcatccgcgtcaagaggcgaagagagcgcgcgctccccacgtcctgcgctcctggctgccgggcattcgtctcagccgtgactctcgccaggccggggctggcgcgcccacgtctgaagagcgatgccccgggagatcatcaccctgcagctgggccagtgcggcaaccagagtgagcaagcgagcgccggccccgccggtctctggttctgccccttcgggtcccacccaagtgcctggcttccaccagtccccctttcccttccatgaaccccctgccctgctgctctggataacccagaccgagagctgcgcctccagcccggggctggggcagctaccaaacccaggcatcttgggtccaccctctgatcgtgtcagcctctgagactaaaactgggctcctcaggccttaaggctccagcagacccgggcatctcccccctcccccagttgggttcgagttctggaaacagctgtgcgccgagcatggtatcagccccgagggcatcgtggaggaattcgccaccgagggcactgaccgcaaggacgtctttttctaccaggtgcccccagcgacttggccgggggcggcagtggcccaagggggcggaagggaagggagtggcctggtactgggaaccccgctgggcagtagggccaggcggctggcttgaggagggagggccggagggagccagagttgggaggacttcggacttgggccgccctagctgattgggccccctcctggactccccttgacaggcagacgatgagcactacatcccccgggccgtgctgctggacttggaaccccgggtgatccactccatcctcaactccccctatgccaagctctacaacccagagaacatctacctgtcggaacatggaggaggagctggcaacaactgggccagcggattctcccaggtgtcctagcgaccattccagagacctttgatattcccatccagaggcaaggcaggctcaagctactaggaatttgacctgactgacagaaaataagagacaaaaggatgtcccgaacaagagggacagccagggagaggtttatgcaaattttgtgcaaatcatttgcaatagtagcacttctgggttgagggctacagcctaggctctgcttcagggtggcaacaatattccagggtagacagaattcttggtgctgtgctgagaaaagatgctctctggaacctttggcctgaccctccctttccatatctctatacagggtgagaaaattcatgaagacatctttgacatcatagaccgagaagcagatggaagtgacagtttggaggtgaagttatggagtgggggaaggaatgggcagggaggccgaagagtgctggggacaggtcaggaggtggcctggataggtaatatgaggggagcaattcaattcaaaacccgtttatggagcatcagatgtgggatattgaggtgaataagatataatctttgttctcaaggaagtcataaatctgaatggcaccggccccttaggcatgagtcattcagctgcttctccagctccaaaccttcccaaggagcctcagcctggatgcataagaggaagctttgagacattggcgttttgggaatggagaatgaaccaagccgaagtctctcccccagatccttggagactgcctctccatctctccccatgctgggtgcgatatgttcctggcttacagctcttataacccatgtaatttcctaagggactagagcaataatagtatgttttgttaaaatatttgaccttttgtccttggtttctgaaacagctccagaacagctccagagtgataaaggtgaaagacagtcttttgttatttataacaagcccgtttcttttagtttaatctttcattttattttaattagttaattttactaaccactgtactaaggaggaacaagtgcctttcaaccaaacctgagcttatgttaaagaggcgatttttggaaagtcccagatagccactggatggggggctggttgccaggggaacaaacctggtgctctgagggttggaatttacaggcccacccctcacctctggggaagggagaggggatgaagattgagtagagcaccaattgccaatgatttaatcggtcatgcctgtgtaatgaagcctccataaaaatccaaaaggactgagtttgggggcttccaggaaggtgaacaagaacacatccacaggccaggagggtgcaaacccaacgccacagggcagcaactcctatgcgccggacccttctagagcttcccctcggtatctcttcatctggctgtttatttgtatcctttaaaatatcctttataacaaatggatgaacgtaagtaagtgtctccttgagttctgtgagctactctaacaaattaattgaacccaaggagcagtcctgagaacctcgatttatagctggttggtcagaggcacagataaaacaacctgaagcttgtgttggcattggaagtgggagagtcttgtgggactgagccttcactctgtgggatctgatgctatcttcaggtacagatactcctcaacttacaatgggtttatcaggatgtaaacacatcacaaattgaaaatattgactaggcacagtggctcatgcctgtaatcccagcactttgggaggccgaagcaggtggatcatccgagcccaggagttcaaaaccagcctgggcaacatggtgaaaccccatctctgcaaaatatacaaacattatccaggcatggtggtacatgcctatagtccaagctacttggaggctgagataggaagatgccttgagcccaggaattcaaggctgcagtgagctatgatcacaccactgcactgcagtctgggggactgagtgagatcctgtctctaaaaccaaaacaaatttgaggacaggtgcggtagctcatgcttgtaatcccaacactttggcaggccgaggcgggcagatcacttgaggtcaggagttcaagaccagcctggccaacatggtgaaaccccgtatctacgaaaaataaaaaaattagccaggcgtggtggtacatgcccgtagtcccagctacttgagaggctgaggcaggagaatggctcgaacctaggaggtagaggttgcagtgagccaagatcgggccattgcactacagcttgggtgacagagcaagactccgtctcaaaaaaaaaaaaaattgaaaataccgtaagtagaaatgcatcaggttataacccaataagcccatcatgaagttgaaaaattgtaaattgaaccattgtaattcagatgcttcttgatttaagatgggattatgtcctgataaacccatcataaagccaaaacatcttaaattaaaccatcctaagtcagggacagtctgtaggtagtccagaattgaagtgaattagtggatacccagctggcatctactgtagaattgactgcttacctgatgtgtgtggtaagaccccacccatctggtatcagaattgtgttgtgagagtgtggcaggagaaactgagtctgtttattcctgtatacacacagggcttcgtgctgtgtcactccatcgctgggggtacgggttctggcctgggctcctacctcctggagcgactgaatgacaggcaagcctgtgtttggggagagggcattaaccctggttccctgagtaatgtcattgcttttttctcttgagctagaaagtctgccactaccccttttgagtcatagggacagacccacccaaggaccatgttggaagctattttggggggtgggggtttacctgtggaggggaggggatctacagagtttgaagctttcaggcttatcctttttggctctgaagactcagttctgccctcaccccttttgtacaaaatggcacatatgggcagtgatggaggggtccttccggttcactatgccaccatcctcttttctctcaggtaccccaagaagctagtgcagacttattcagtgtttccctaccaggacgagatgagcgacgtagtggttcagccctacaattcactcctgacactcaagaggctgacgcagaacgcagattgtgtggtgagcaaagaaagagttgaggggctgggtgtggtggctcatgcctgtagttctagcactttgggaggcctaggcagatggattgcttgagctcaggagttcaatactagcctgggcaacatgtgaaaccctatctccacagaaaatacaaaaattagagctgggtgcggtggttcacacctgtaatcccagcactttgggaggctgagacgggcggatcacctatggttgggagttcgagaccagcctgaccaacatgaagaaaccccatctctactaaaaaaacaaaattagccaggcgtggtggcgcatgcctgtagtcccagctactcgggaggctgaggcaggagagttgcttgaacctgggaggtggaggttgcaaggagctgagattgcagcattgcactccagcctgggtgacagagcgagactctgtctcaaaaaaaaaaaaaaattagccagtcctggtagcatgtgcctgtagtcccagctacttggaggctgaggcaggagaatcacttgaacccgggaggcaaaggttgcggtgagtcaagatcacaccattgcactccagcctgggtgacagagcgagactctgcctcaaaaaataacataaaaaaaaattagccgggcatggtggcatgtgcctgtagtactagctacatgggaggctgaggtggggggattgcttgagctcaggaagtcgaggctgcagtgagccatgatcacaccactgcactccagcttgggcaacggaacaagaccttgtgtttaaaaaaaaaaaaaaaagggtagaggactttggtctgtctcctcaggccagtgagtctcattcaccccacctttcctcagcccctatacacacagacagaagaccaacaaagccatacctgtgggccaaattaggaaataaggtcctgacttctaagtttcttagaatccttttaggcagcaaaactctcaacaaagtgaatataccttccccacaccaccacgtatcccacctttgcctacttaatgcccactcatgcttgtattcttagctcaaggataactttcttagcaaaacccttcctgactactcagtcaagatcagattcctatatgtgtattttagggagttaactataattttctgttttatatttagtgtgcctccctccacgagactataggcctaatgaagggaaagacggtgcctgttcctctctgtggtcttcccagagccaggcacagtgtatggcacatgtgggtactcacgtgtttgtttactgccctgcgtagtccgagagtatctcatggtgccccagaaacagtacttttctttctttttattttttatttatatttatatatatatatatatattatatatatttatacttttttatttatattttttacagagatggcatcttgctgtgttgctcaggctggtgtccaactcctggcctcgagtggtcctcccaccttggccttgggattacaggcctgagccaccatgcccagcagtacttttattttattttatttattttattttattattttattttatttttgagacggagtcttgctctgtcccccaggctggagtgcagtggcatgatcttggctaactgcaaactccgcctcccgggttcatgccattctcctgcctcagcctccgaattagctgggactacaggcgcccgccaacatgcctggctaattttttgtatttttagtagagacggggtttcaccgtgttagccaagatggtctcgatctcctgaccttgtgatccgcccgtctcggcctcccaaagtgctgggattacagacatgagccaccgcgcccggcctcagtactttttttttttaaactaacaaacctacttcctggctttggagttcagcaggggctaagccaatatcttatttctatgcccattttatcctcaagatgctgtgatgctcttctgtccccccaggtggtgctggacaacacagccctgaaccggattgccacagaccgcctgcacatccagaacccgtccttctcccagatcaaccagctggtgggcccccactcccggactcctttggactggaagccctccttgctggagggtcatctggggaaggaaggtcccacccaggccgagccccatgacatggcacgcctgtccccaggtgtccaccatcatgtcggccagcaccaccaccctgcgctaccccggctacatgaacaatgacctcatcggcctcatcgcctcgctcattcccaccccacggctccacttcctcatgaccggctacaccccgctcactacagaccagtcagtaagagcagccttcagtgtcccaggccaggctggccctgggcccagcaggccctgccccagcctttctctcttccccactgccccaggagctgccctttgcaggccccaaggcactgcgctcagggactggcacagagcgggcgactttcttgctgactttctctccaccctccctctgcctttggcttctgccaaagagaagccaaagggactgtgccctgagcgctggccgggtccctgtctcactgtcccatcaggtggccagcgtgaggaagaccacggtcctggatgtcatgaggcggctgctgcagcccaagaacgtgatggtgtccacaggccgagaccgccagaccaaccactgctacatcgccatcctcaacatcatccagggagaggtggaccccacccaggtaggggaggccccttcatcccgcgccctggacctgcaggggtagaggagaggccacctccactgctcctatgcccaccccaggtccacaagagcctgcagaggatccgggaacggaagttggccaacttcatcccgtggggccccgccagcatccaggtggccctgtcgaggaagtctccctacctgccctcggcccaccgggtcagcgggctcatgatggccaaccacaccagcatctcctcggtgagtctaggtttctattcttcttagaagagtctgttccactggccaccttcatcatcttccccaagttcactcctaaccccctggctcgcattttggagattttcatctctttcagctctttgaaagttcctgccagcagtttgacaagctgcggaagcgggatgccttcctcgagcagttccgtaaggaggacatgttcaaggacaactttgatgagatggacaggtctagggaggttgttcaggagctcattgatgagtaccatgcggccacccagccagactacatttcctggggcacccaggagcagtgatttccctccccactactccttctccttctagatggtaaccacagcctcgaccatgcctgctccctctgacccagcttcacctcatggacaacccttcttggttcatctccagcccgtgagctggtcctgcttcctcccttccatgccctaacttttaatatgcttgttcagctctaataaagtaataaagcttggttgtcagtatagccagggcttgatctgtgaatacgggggggtggtgaaggggtccagtttctaggcatctgacagtagggtggccttcacctcctccaacgtcttatcacttagtccaaatcttagtgtgttcactgtttccattggcatccctcaccttgaactaggctgtttagtattactagagtcagcccttgtctcaagattacagagctttactgaggtttgctgtctcctcagcgcctaagctttgccccagtgagggtcaatgttgccccaacctcttccactcagggcagaggaggtggggtctactgaaggagggcacactacattctgagcaggccaggagagccaaggttccagattcccagtgcccagggccatgagagttccaggaactcaatccagttcaacccaacctgataagtagaaacagaattcaagagtagggctgagcacatcctgagttacttttctgtgccagagaaattcgtgggtttgttatctgccccaagcttctctccattctaggcccaaagcattaggcacaccaatgatgggcccagaggtggacaacgagtaagaaatgggcagtgccagatctgatgactcactgccctccagcctcagggattccaggaggccatctgtatgccactcagtggagaagggagggtgagtaactgccagcttccaatgaggcctgtttgcctgctccacccacaaacctgtggcagcacactggccaggaggaggttaagtctggaaggtcaaggagggggagggtgaagcgctgtggtgtccagacttcccccagagcctggtaaaagcccagggtgtgggcatccccagaggcggggctctgcgttatggggttccaacttgtcccactgaataacactcccacaggaagggtttgtgtaaataagaaactttttttttttttttgcttctcttctacaaataaattaagaaacaaactagaaaattacccacacccattgtagcccttgggtgtgggatgtgccctgtccctgcagggccaaaagggtccatgtttccctcaaatctcagagcagtcctggcccaggctgcaggcaggagggaagtcgtgacctcttggcaggctcagtcctgcagctgccccaagcagccagactgtccctggggctcgtccaggcccgggcgctggctgggaggggaggtgtctggcaggtcttggcatggaggagaagagctgctgcagggcctctcgggggaggggttggccaagtaggcattcaccagctgcatgatctcttccacctaagagagggcagaggtcagtgtgcaacaggggctgccaggttctcttctttttctcatcctttctccaggctctagggctccagcttccccaccagggtcctacgtgctctggccctgcaacctttccttccttatcaccactctctccttcatttcttttttgttttttgagacggagtctcgctgtgtcccccaggttggagtgcagtggcgcgatctcagctcactgcaagctccgcctcctgggttcacaccattctcctgcctcagcctcctgagtagctgggactacaggcgcccgccaacacgcccggctaattttttgtatttttagtagaaacagggtttcaccgtgttagccaagatggtctcgatctcctgacctcatgatccgcccatctcggcctcccaaagtgctgggattacaggcgtgagccaccgcggccggcttctctccttcatttctatgtgccagttatacttggttctttctgctcttctaacatttttttttgttgttgttgttgttgttgttgttgagacggagtcttgctctgttgccaggctgaagtgcctcggctcactgcaacctccgcctgccgggttcaagcaattctcctacctcagcttcccgagtagctgggactataggtgtgcgccaccagccccagctaatttgtatttttagtagagatggggtttcgccatgttggtcaggatggtctcgatctcctgacctcgtgatctgcccgcctcggcctcccaaagtgctgggattacaggcatgagccactgcacccggccaccttgcaattctttctacctggaatgctgttctcccaggtcttccctggctagcttaaatggcaccctttttgagaacccttccctggcttcctgtcacatcactctttcctttgtagcatttctcactgtcttcatagcctgggattccttgtttattgtctgactccactctagtgtaagctccttcagcttgtctgtgatcactgctggatccccagtgcttagagctctacctggcccaggtttggtgttctgtaaatgcttcctgacatcgcttcccttctctcctcctcccacaactcctcttctcactcacctgggggctctgcaggaggagctggctctctcccaccctcaaggccagggtgtgggggcccattagctggcaggcggccacatggccatagctgacactgtggatgggctccgtctcccctggccgggagagggacatggccttggctcccaagcccaggcacagcttctgtggagcaccccgaccaggctcctgcagacagagaggcagagtcagggtggaaggaggagcccagcgttatttttggtagggggagatgggtgtctgtgagcaggagtatcctgatccccctatgattcacagcacgtgtgtggagggggctgaggctccagggatgtgagggcccaagggctggtgactcctggggtttgagatgggtagctgttctggatgtggggaattacgtgacactccgtgggacctgtggctctggggcaaaggtgtggggcttgggccgccagagtccccttctcccttctccccctcaccgtgctcagctccagaacgtcataccgagcagcgccgaaccccggacactgcgccgccagggccaggtaggcggccatggcctcagctcggcccatgccccgtagccgcttccagccgcccagcacggcagctgccgtgccggcgccgcctcctccctcgcgggcaatgcttcccgcagtgcggccggccccgccgcgccgggcccgctccgcccgcctcttggccaggcccgggctccagagcgccccggccagcagggcagcggaagggggcggcctgggggtcgggcggggcgggtcttcgcgcggcggggccgggggcgggagcaggcggtccaggcggggcaggggcacccgcggagagaagtcccgctgcaggctctgcaggcgcagcgccgccagggcgcgcagcgtgtcgtcgggtgggggcggccggccccgcagcagcagagcgtgagcctgcaggggaggcacccggcgtcagtgtacgagcggcggcggaaccgtcgcgaaaacgcctcgcggaatctgagcaggtctaggttccagtcaagcctcccgcggggctgccatagtgatgaaatgagacggcctagaaaaccaggggttcaggcttgggggtctgtttggaggcgtgaacgccggagagcctcacctgctcaaagaggaaaggcagttcgtgaccgtctggggacagcccctcagggtgcagaggtccgtgaagacgcagacatagtctccacccggagtcgggcgagtcctccaacccagcttcctccgcggccaagctgcagaagaggagcggacgaagcgctagggagaagccggacccctacggcgagggcagcttggggtgggggcggggccatgtgtttggggcggggcctgggcggagccgacagcggaggtgatgctgcagtcggactgcaaacctgcggcgggcaggtccgtctgtaaaccagcgaacaccacagcgcagggccaggggcaagcgctggataatgtccgcttagagactgacctcagctgagaagtggatgggctaatagagagcagggctggggctggacatttacttctcaaacctggtgagcacgtcggccacgagggtccccccagccagggctcgctcctgggcccctcgctgctcgtacagcgcgaatgcgttgcggctccgggccaagcccagccgccccaccagctctcgagccacctagaagaggagggtgaggggagaccactcagaggtcttgccaggattctgggaggggttgattcaattggaaggggtctcttagtcctgtcaccaccactccctcccttaccaaaataatctagactcggggcaaacctagggtccaggaagagggagagacaggcgtgagaagctggcagggtgggttggaggtcatggggcctttctctggcctcacctcccccgccgtggtgtgggagtcgatggccacagcacaggcaccagcccccggacagtgcacggtacacagcagctcctgccgttggctcaacgcggaaatctccgccagcgagggcaccagctctctgccgcgcgtccggcccagcgctttccggatgaagcgcgcatattccgccagttccgagtccgggagtgcctgctcggtcctgggttaggaggaacccagggatcaatactccaagggctttcttctccccctccctcttgcctgcttctcttatagtttattttatctagccgatttcctccccgccccaactcaagttctttgaaggctcttctaaatctctccccagtgctttgcatagagctgaattacttttcaagtcccctggcagctttctcccaactgcctccaccacttccaaaagtcttcgtgatcttccttcggcctgaaatcgaaatccagccactttactacattttcctaagccctggcgctggcctgcatcagctggaggaaaagcagccttttcataactcctcagcccaaggggggcgttttattgtaattcatccgctcacaactgcgataggatcttgtatctcccacaaaggcactgtatgtattactcggttctttacctaccaagtcttttgcaaaagacctttcattctctcccagcccggtagctcctcgcctaggccgtaacccccacctcgcccctctcacctctccaagtgccccaggaggtgcccccgcacagctcccccaggtcggaaggtgcagctcatgcaggtgaggagttgccagtaccgcagggccgcagggtcttgggtagccgggagcccggggggacctgcagggcccgaggtctgcttagccagctgcaggaagagttcatcccggagcgcgggcaagtcccggcaggtttggagcacaccctgcatcaagggcccggggcgccgcgccccctccagcgcctgcagcgccaagaacagccgcaccgcctcctcgcgcaggggtgcatagcccggacctgtgggagggtgggggcggagggacggtttggagaggggacacagagctgcgccctgggaggaaggcatgaaccaggggaaggtcagagggaatataaggggatggggtggcagggaggggagggtacgaacgacaggaagagtgaagggaaagcagtggtcccacggagccagactctcaacctctgcctcccaggaatccccttcccaatcccactaagcctgcatttggacttagggagacggacggccgggaagggctgtagattcacaccccagattctgtaactccatactgaggctcaccaccataggtcagaaaacaggctggactaggagtcagaaaaccggggttcctctcccagcaccctttaatcctctaactttaggacctgggccagtcactacaccgtttagggagaagtacagttggatgaggccagcacattctacaaaagtggtagcttttctaccacttgtaaaggtaatatggcatagtctcaagaggataatgaaaaaataggggagtgtacaaactcctgaaggaacatcagtagtcagaatgagacccatagagaaggtggccaaagggggcccttttgtgtgtgctggcttcctctcctccaccctggccagcttccagtttcaccttcatccttcgaaaagtgaggagctggcaggtccatgaaggatgcttagatccctgccagttaagggattcagattcttacctctgaaccaccccatcccatccaggggacttgggccatgggaccactcacctggggcgctgactccatagggcaggggcaggagtggggcatacaaggctccactagtgtgtctcagaatcgggttcctcaggtaaatgagggcaacggcctctgggtccccgcaactttcctagggggccagggagagggtcaccttgatggggaagggagttcctcacaaccccagaaagctttggggtccaccactctcctggctctccctggtgtgtacctgtatgtccctgagcagtagctgggtgggggtctccaggggtgccttggaggcgatcacttcccgcaatgccaccccccagcgctcagcctctgcctggcgtggggagcagaggcggacactgtgtttccgaccagacacagtcactgaccacagacctggggaaaagagaggccagggagggccattagggtctgccggggcccctgcctaggaaggtaggagagtccccaggaggtctcacctgtctccttacgcctgcgctctgggccggtcaccgagcacaggctggtgagcacgaggctcccgagacgccgcgcccctttcccgctgctgctgaactgatccagggagtcccgcgtgagcacaaaccaggctcggcgcgggggcagccagggccgcgcccctcctccgcggggctcccggtacagccaacctgggggccggagagggagggaagggacatcagtagagacattaatccctagggggttgggattgggggcctccagagtgcactgaggggggtctctacctttcacaacgatgtccgggtcgtcctccggcagccctttctccgggatgaggctccaagtctcctcccagctctgcagcctgggccagaggggagggaaggttgggtctccactctgcctctagggggctcctctgtaggggctccccagaccgcacgggtgtctgctcccaagctgggcacccctcccccaggctgtgggaaccgctgggccattctgacctcgaaccagaaatagccccgacccccctctttctccccgcgcccccagccggaccgccccccgggaccccagccaaaccacagcgtccggcatagggcctctcccttattgcacaaccgctaggggagacagagaggatgggggtcccgggaacatgctggggtcgccagactatgggacgtaggggcgtagctcacctgttggagacaggcccgctcctcactggctgagtcagcgtcacttccaggggaccctggggagacaggcggggaagccctcagggtcagagcccttcctgcgcaaggttcgtgccttctgccctcaggacagggctgctcaggggattgaggaaggaggagtcacagagtggggtcgtgactagggtggagcacgctggagcccctgggctcgcccctcccgccagtcttaacaggacaagctcttcagaacagcaggagctaaggagccaaggctcctctcagttaccctttgaaaatacaatcaggggtagggtagggtggaaagagcactgggcagagagtcaggagacctgggttccaattcccgccccaccactaactcactgtggaaccttgggcaagtctcttcccgtctccgggccttagtttccccatctttgaaacaggagaggtgagctcgttctgccaggctccaaggcaccctctcctcctcattttcccttcttccacactgcctccctggccaaggcaggacaggtggtaggcacagaggtgaatgaagggcagagggaccctttcagtatagggctttctccaaaagcgtcttacattctcccatagacactcctgagactcaatggtgagcagagaccctgcccctttgctggggcttaggaagggcgggccagactgaggaatggcacaccctctggaggcaggtgtagttcagggttttgccctccccctccccctcctcctcccttccccctgtcctggaacttcaactgtagactggggtctgagagaggccacaaacccaacccggaggccagtcaggcgggaaccgtgccatcctcatattgctcccagactgctagagccaagagggggaggtgggggagggggccagggacacctgtccccaggctcagggaaggggggagttgaggtggagcatgagggaggcaatggcctggtaaagccgaccctgcccaagctggaagcttggggacgcctgggtcctgcacccttcctacgtgaacctccacctattttctggaaggtctgagtggggctgtcagccacaccacatgtggcaggtactgaccaccctcttaggctaactcccctaatcgcagtgccctgcttccctccctcccccctcctctatatttatccaccctccgcctccgccaggtgctggcgccggccccggcggcgcagcccgccccacccgggcaccgagccactgggcctgctggggacccctgcgcgggggatgggagcctgacccgggccacagcacacgggagtctggccgccagtgtgcaggagggatgggggaggagacgtcaagggatggaggtctcccacaccaatcgtgcctccgtttccccacggggagattcgacaaaaccaggcagcagcccagtgtccctcaccatccatcccctcaggggtttcccaggagcctcacccgggaaagccgagagttctgtcctgagtggcagggtaatgaggaggggtcctcaaagagctcccacctccctctccttggggtccccgccacagaccccaatcctgggatgacttctccccctcgtccaggtctccgcagcgggagctctcgcatctggcctccgcacttgcgaactgggagcggagggggacccaggcgttcgagccgcccagccggcctcgccacattcctcggcgctggcggaggcggaaggagacgggatgggacgcgggcccagcggggaagggagaggcagggccaggtcgggccacgcgtgacgcctcccctgcctcagggcccccagcaggtggatagcgcccagcctgcagcgggaggcccacaggcacatcccgagtagggctgctgctccgagagctcccgggggctttggcccccaggcaaaaaactctccctcatccctagttcgccaagcgcgcagcgtgtggctggaggctggagcggatcagcgtgacggccggttacagcgagagtgattgagacgaggctccgaacccccgggacttaccctcccgccgcccgctggactcggggtccgcagctcaaaggtttcctcgtcctcgtcctcgtccccgtccccgctaagctcgccgtccccgtagtcccggtgcagaagagtgaagcctcgacggcagcagagaagccaccatagtcccccggggagaggcatccgggcgaggagctgcggatgggggcgcgggcagccgcggccgagcagtagggggtcggaggaactggcggggctccgacccgagcaggggaaagatgaggtgggaggagcagaagggagaagaggacagggaggaggcagtgtcctgggctggggtgcaaggggacgctagccagacgctgaggggggctcagtgtctgggcccccggaggggggagggggaaaagcgtccagggccccgggagaggagggagcaatgtccggagctgggaagtagtgtccgttggagtgtccagccctgtggggggcagtgtccggtgcagcgtccgaggtgggcagttgtccaagctccagggagggtcgtgtccggtagggcgtccggtggccggggcccgggccgcgcgcgctgcgctccctgcagccccgggactggcgcgctgggggcgcgagcacagagctgggaccccgcccccccggccccctccctcccggggggccccccctctctcttctttctctcctcccttctttactaggcagggtccaggtttcgtcacagtctcctctgtccaatccctgtgcctggcgccgggcgcggctaccaatcagacggctgaaaccgcgttgggttgcatcatgtgcccctggcttggtgacagcggggaggggcggggaaacagggagggaggggacgaggctatgttagccacgccccagtctctgaggtcggacgcggggtgctagtgacgtcacggaagcccgccttcaggctcttgttttaactcttggctcaccaaccaattaaaaaccctgttgaggagttttggcacaggacagaggaaaacccaactgccgctctctgaacccctgtctcgtctcagggtccctgagaaagggaaacgccttggctactaagaggatgtccagacctgcgaggacacagctctggaggtggccctccacgtctggggagaaggagtccagtttctccagtttctcggtctgattcagctctcccccacccttttttttttttcttccagacagggtctcgctgtcttgcccaggctggggtgcggtggagccattatagcttactacagcctcgaactcctcggctcaagggatcctcccacctcagcctctccaggagctgggactacaggcgtacaccaccatgcctggctaattttttaaatttattttttgtagaaatggagtctcactatgttgcccaggctggtctttaactcctgggctcaagcgatcctcccagcttggcttcccaaagtgctgggattacaggtatgagccactgcactcggcctcacctccttttcgaggtgaaggagttgaggcaggcactctgggaaggtgcagacctaggccggaaataaaatcgaatatagagctcacagctcaccgaactcagctggggagactgacttggattctaaggaattctgtggtctccgaatacagtggaggcctcttagggctaatatcctgcggctctgtataggaaggggttaactcaggcgctaggcggccggggcggggccgcggcctccgcgggcgcgcgcgcgcgttgctgactcagcggcgattccagagatcttggatggagggttccaggtcggtccccagtggctggcgtgtgggaccctttgaggatcggcgccgtctccgggccttccctggatcctggcccctagaggccgtgggggaccccttttcgccgctgctgcgggaggctctgaggactgctagcctgggcagggctgggctgggcggggaggggcggggaagggcgggacgggcggggccgtcaggccagcacctcccttgagacctcctcgccacgccccgcccttctcgaccctagactccaggctggagcggtggggacagctttgctgaccgatattaaaccgcgagaactgtcgcacgtgaacaccatcctgcccgttgtgattgtgtaaaacaaagaccaggaatcaatgcgagcgtgtctaggaggccatctcggccgtggcctctctccacatgagagtggcctgtactgagagattacctaggaatggagataccacaaccatcttccaggtctggatcccaggcccttgcctgcagagaagttttttcccatatccaacctctctctttccggccagctcagtgcatttcctctgacccagtccccagagaagatggagaacagcaaatatccctcacccccaccacacccgtgataactactctggaaatttgcagattgcaatccctcctaggtttttcttcaaggtggaaaaacttcaactcaaattttacaattcattttttcattttttctttccatcacagacactaggaagggattgtaaagtggttatgaaatccaaacgcccaccaaaaacgggaatcccctgcccctccccctccccccacaccacgcaaaggcccacagcgtccccgacagtctgaacattccaatagcgggaactcagtatttgctaaggcagccattactggagagcgctctggttgttagaaagctcttccttacagtattgcaagaggaaccaccgcccctccttgcctggcagctttcccacctcacctctgttggctgaggccaggtgacggtggagggggtgtcagtggctagagctttagcagactcagcagccccccacccccacccaggccctcagcgtcttccactcagagagccaagcgcggggcagggcggggggtggggcgggggcggggtgttaacccaccggttctgccccgccacaaatcacttccaagtcggtgactcaaaaatagtaacagttgttgggttgcatctcatttccatgttatcaatttaatgtggcaaggcacagaggtagtccctttaggtccctgcctctttctcagtgttcccccacctactcccctttcccacgaccctcagcctgccccctcctctagattcgcagccctagttgtcccaggagagactgtgggtctccgtgggagctgagcaggaagaaaggcggggccggcgggggcagccgcggcggggttgaggccctgaggggcagctcccaccccgtagcagcctccgcaggtcctggcggaagcgcaggcccaggaaggcgtagagaacgggattgaggccacagcgggcgagggccaagccgctggtcaccagcagtgcgacatccttgcgtttgctggcagggcagctccgctcgcgcgcagccagtagatcggcagtatccagcagcagggcgaggctgtagggcagctgcagcaccacgaaggccgccaccagagccaccacgacgcgcagcgcacgccggcgctcgggccccctggcggccagcagcgtgcggcccagaagcgcgtagcaggctaccatgacgcccagcggcagcgcgaagcccagggccacctgcgccacggcgctcgcccccttcaccgtctgcgtgaggccctcggggaagatgaggcgacagcgtcgttggccttcccgctgcccatcctggctgaagagcagcgcaggcagcgccaggagcagtgacagcagccacacgatgacggagaccaagtgtgcgcggccgggagtggagggccgcggcccggctgggagcgctcgcgcgatggccacgtagcggtcggcgctgatacaggccaggaagaggaagccggcgtggaaggaggccgagtagaggccagagatggtgcggcaggtggcacttcccagactccagccctgaagagcccctgctgccgcgaagggcagagtcagggccagcaagaggtcggccagggccagctggagcaggtgggcagaggtgggcgagcgcgctgcgcgtcgggctgccaggtgggtggccaggaccaggccattgccggccagacccagcgcagccacggtcagggagacactgggttggaaggcccggctgaaggcctggacatcggccttgtagcaaagctccggcagtggctcagccgagtatgcgtcctcttcatccccagagtaatggccccaggaaacctgggagggtcaaatgagaggcgggatcttatgagacacatctgaccacacaactcccccgcccacacttgccttccaagctgagagctcctgtgtggccagatgtaacagtacacggggagacataagctcttctccagactcttcctagcacaccttcagcaggccttggcttcccttgcacccctcctacctctgcttccagcttcctgggtgaccttgagcaagccacttgctctttctagacctcagttacctaacctgtaatgttgagattataaatcctgaccagcccacctctcaaggtttgctgtgaagatggcaatatggaaaataatggatggggagaacctgtgttctccaaaggccataatacaaagtttgtattattattattatttattattattattattggagacagagtcttgctctgtcgcccaggctggagtgcagtggcacgatctcggctcactgcaacctccgcctccgggttcaagagattctcctgcctcagcctcccaagtagctgggactacaggcgcccaccaccacgcccagctaatttttgtatttttagtagagatggggtttcaccatgttggccaggatggtctcgaactcctgacctcaggtgatccgcccaccttggcctcccaaagtactgggattacaggcctgagctaccacgcccagcccaaagtttgtattattaataaatcctacagcttcagttccctttgcagcgccctctcctggaaggatgcccatatgcaggctttgcctcagacctgagccctggactccaacctccgtctggagtgggtttctgtttctcttctttcccttccatacccaccttccctgtacctccaataccagcacactgaaccactcatgccaagggggtctccagggttgggactcaggttttcagggcccaggtgggaccctggacctctaggttcaacccgcctttcccctcagccctagtccctgtcccacaaccccagcctcacaccaccagcccatttatctggaggacccctagtctgagacagcgccaagaatcctgaataagccataggatggcagaggcccattgccaggtggggaatcccattccttccctgtctcctccctctctgtaacccttctccccctccctgcccccactcccacctgctctgtggcctccgtccccatctctggctacacaggtttctgaggtatagccacagggggtagaagttaaactactagcgggacaggaaggaagaggcggggagaggggccgagagggaggtggggattagggtctacggggtcactttcccattccacctcctccaaaagacttcactctcttgtgcaggatctggattttacgaaaaaaaaaaaaagaagaagaaaggaaggaaagaggaaagaaagaaagaaagaaagaaaaaaaggaaggaaagaaagaaaaaagaatgaacgaaagaaagaaaaaataatttactgtctttgtcagtgaagaaagaacgggcttcggaatataatcatttgctgtgtgatattgactaagtttcttgacctctctgagcctgaggtttttcatctgcaaagtggagtagggcaaaaatgctaaattcacagtgcccagcaccactcctagagcataatttgccttccgaaaatgttaagattcttttacttacccttcattccatttccaggcacccctcccccaaaccacctcccttttcttgaaattttcaggatgcttctggccctaggttccctgtcctcactcctgtggccctagtcccgggcagcctcgggttacttggggttttcccggtggcgagaggctctctacccccgccctttcgcagcagggctgaggcacgcgcttgcgcggggtccgggaaaccggcgcgtgccaggagacagaggctggggaaggggggaggtgagaggaaagagggtggaaaggagaggatagagagagaagagcggaggaccaggaaccagagagagagagagagaaaagagagaggagagacagagcgcttgggggcgaaaggagagagggagggaagggtgggtaaggaggagagagcggtctgctgcaaaccccaggaggagagcttggagcccaagccagaactcgagccctagccggagccgttcacagggaggcggctgccgggaccgtcagccctgcatgatgcatctccggctcttctgcatcctgctcgccgcggtctcaggagccgagggctggggctactgtgagtgttgggcttggaggcaggtggggttgggcccaggagtccagagcctgcagggcggccccgaaccgcattgcggctgggtggtcgcgggtccttcccggccggcgcgcgcccgctggctctcatcttttcctgcctctcccccgcgctccgcattgcagctctgaggctgccgcgcgcgcccggggctggggctgggctctgggaagaggatgaagtcagcgggcagggatttggggttgggatccaagcaggagctggtgcctgggtttgaggctagggctgggggataagtgtatactggtgaccgatactaggattaaggttttgccagggcttaaggctggactttggagctggccaaggggtggggtttgtggctagggctggggtttgtggctggggctgggttttgtggcagggatccaagcaggagctggtgcccctgactgatgctaaggctggacatggagctggtgatggtgctagcactggctgaggttgggtgcaaggcctgtatttggggatggtgcaggttttgggggccgagttggattgaggctagggttggagctggattggtgtcttgggttgacttaggttgtggaagatgctgaggtttaggattgagtttgggaaagtactaaaccagggcaggtattgggctagctagggagggtctggccttgggcctataggtgtagcctaggggtttgcctagaaggagaaggtagcctcctctgagcatgcagctgttgctgcagccaggattgaatagatggctttaaggtagggctgggtgtgcctctgggggcgggggttgggggcacggaaggggaagcttcggtcgctaagtgggccggcctttggaagggtctgggaggggccagcgctgactaacagtcggtttccctaccctagacggctgcgacgaggagctggtgggtcccctgtatgcacgctccctgggcgcctcctcctactacagtctccttactgcgccgagattcgccaggctgcacggtgagctccgcggaacatcagctgccaactggcagcgcaccgcggaagggtgggggcctccggaggacttcggggagagggatagccggttaaagctcctgtcctttctataggcataagcgggtggtcaccacggattggggatccgaatccctggctccagatagacttaatgaagaagcaccggatccgggccgtggccacacagggctcctttaattcttgggactgggtcacacgttacatgctactctacggcgaccgagtggacagctggacaccgttctaccagcgagggcacaactcggtactctgggcgccaaggcggtaacacttggggagcttcctctgctccaggctctgggccgggcaccagcctctgggaaaatggagggggtggtggtgagggctcggacaaggagcagtgactccactccagggactctgtccagagggactgtcagcttaggacgtgcgcgaaacactcggttcacagggtttaacacactttagggtaaaacctgggagagcttcctaaggaggtgacatttgatttcaggtctgaggaaataataggattgtgggacagggcactttatggaaactgtgcgggcaaagccgccaagcagggaagaccaaggagtgtttactttccagaagtcgagattggctgggtgtgaaagttgtgggctgggaggctatggagaaagaagcagaggggggccgggcgcagtggctcacgcctgtaatcccagcactttgggaggccgaggcaggtggatcacgaggtcaggagttcatgaccagcctggccaacatggtgaaaccccgtctctatgaaaaatacaaaaaaatcagccgggcgtagtggcgggcgcctgtaatcccagctacttgggaggctgaggaagagaattgtttgaacccgggaggcagaggttgcggtgagccgagatcgtaccaccgcactccagcctgggcgacagagcgagactctgtctcaaaaaataaaataaaaaaaagaagcagagggcaggacgtggttactactctcctccacccccgcagaccttctttggtaacgtgaacgagtcggcggtggtgcgccatgacctgcacttccacttcactgcgcgctacatccgcatcgtgcccctggcctggaacccacgcggcaagatcggcctgaggctcggcctctatggctgcccatacagtaagtgtgcagagagcgcggagggggcctgggagacagcctccccagttcccggcccacctacggtcctttgcgcagaggccgacatactctatttcgacggcgacgatgccatctcctaccgcttcccgcgaggggtcagccgaagcctgtgggacgtgttcgccttcagcttcaagaccgaggagaaggacggtcttctgctgcacgccgagggcgcccagggcgactacgtgacgctcgagctggagggggcacacctgctgctgcacatgagcctgggtgagctcggcgaccatgtgcgatgcggagccaacccctgaagctctctcaccgccctcctcgtggcacctcctccgcgcatccgcgctcagcctggtcttccacttctctaaggcctggaccaaactgcccctttcttgtagcatttggtgctagcaaaacactggagttgagtgagaactggattccagtctcagctctaccactacacagagatgtgacctcggatggggcacttccgagcctcagttccctccttgtaaacacacacacacagacgcacacacattgtatctcattagcttttcataacacccgcacatgaaatagaagcagctcatgtgttcccagttttacagacaggaagccaggctaaatggcttaccctgtcacacactcgccaatggctgttgatctattcgcccactctccctgattgccctgggctttgttacacgctgctgctctgcctaggagcttggactccatggagttctcctggcttgaggtttcactctgtcctgccccaccctcaggcagcagccctatccagccaagaccaggtcacaccaccgtgagcgcaggcggagtcctcaatgaccagcactggcactatgtgcgggtggaccgatttggccgcgatgtaaatttcaccctggacggctatgtgcagcgctttattctcaatggagacttcgagaggctgaacctggacactgaggtgagagactagggaggtgctatttcgtggtagggtagatgctggatgagtgagtgcaggtcggtctctccctttctcttttcctctgtctctcagaggaaagacctggcattcaggctgtgggtggtggctcatgcctgtaatcccagcactttgggaggctgaggtgggaggattgcttgaggccaggtgttcaagactcacctgggcaacatagtgacatcctacctctatttaaaaaaattttttttttcaaagacctcgcattccaattcctgaatatcctagcagcccttggcaaacttgccactcaccagaaaaaggcctgttttttttttttttttttttttttgtgggtgttgttgctgttagcatgcagactcccaggcactatttcagaactaatgagatggggtttggaaattcagattttggggactaggcaaggtaggaaaattgttcccttggatcctcccacaactttgtggagttgttaaagaccctgaccccatctgcagataagaatcccaggcaggctaattgacttgcccaagggcgtgcagccgatttgtgttggagtcagagcttgaactcaagccttgaaaggcctagcgagctttagtaccgacactggggaaatgtgtgttttaagtcttttacaaaaccccatctggcatttgggaaagcatacggcggggacgcgcgagaaaggcaggcgccctcctgtgcccaagaggcctcattccccacgcctcccgcagatgttcatcggaggtctggtgggcgccgcgcggaagaacctggcctatcggcataacttccgcggctgcatagaaaacgtaatcttcaaccgcgtcaacatcgcagacctggccgtgcggcgccattcccggatcaccttcgaggccagtgggcaggggggtctgggaggacaggatatcaaagcgtcgtggaaagcaaagaggtggagcgggaagagatattgaacatcagataaaagcggagaatccctctgtccccagccagatgctcaagttgggaggggagcgggtctcacctgaggtgcatgagccacgcaggcccctagttaagaagcagtggtcgggtccaatcaccttcttagttcatagatgaagaaagtaaggcgcagacacagggagtggcttgtccaggggtcgtgcagctgcacggtggctgagtagggacttgaaccgatggcttctctgatatgcccccctcaaccctctccgactctggagctctgttgggaagctggcaggagccaggtctgtggtccaaaattgcctctcgatactggaaggagagaagcggtcgaatcgcagacggtggagatcagcgagagcaagcgagcagagttccgagggccgactgggttggggccccctccacagatggacgagcttggaggggaagaggtcacgtcatggttggagatctcacccccgccaacaccgaaggagggcggtgaccagggtcttagaccggtgtgaaaactgaattcccagctgaggcagaggcggctcacgggtgttgatgcgtcttcacttttgcccctagggtaaggtggcttttcgttgcctggacccggtaccgcaccctatcaacttcggaggccctcacaacttcgttcaagtgcccggtttcccacgccgtggccgcctggcagtctcatttcgcttccgcacctgggacctcaccgggcttctccttttctcccgtctgggggacgggctgggccacgtggagctgacgctcagcgaagggcaggtcaacgtgtccatcgcgcagagcggccgaaagaagcttcagttcgctgctggtgagggcgtttcgggggaggcacaagaagagaagagaagtgtagaggatcccaggaaagttgtaggcctggactgaggcctttacattctggagaggggagaggagtgaagggggcagggcaggaggccccagggtactgggaaaaggtgggagtggctagaggcagtgaggaggcgaatctgagggactaagtattcttggagaagggggaagcctgggagtcctggtattctccagttccagaaggcccctggagatttggttactcgtttataactgtgcagactctgtggcagttgctgggtcatggataatgaagagacattcagagaggtctccactgggtgtgagaagtgtaatcacgggggcacacaggctgctactgggacacagtggggctgctgcttccccactcagaacattcttctaccctagttgctgcttccctccacccacaccatcatccattcttgtccagggtaccgactgaatgacggcttttggcacgaggtgaattttgtggcacaggaaaaccatgcagttatcagcattgatgatgtggaaggggcagaggtcagggtctcatacccgttgctgatccggacagggacctcatatttctttgggggtaagtgggggccaacctgaccagacctctgtttctgggtgggaaggctccatctaagtccacccagatggggccacatggagaattttggagggatcaagccctcttcccctctggggcctcagggagtggaaggtcattgccatctacactttggttgtagtcccctttcttcctttatgtctggctccccctcagcatgtccctgggggagggtctttggggtctcccctggggaggatctcacaggggtggttgctccaggttgtcccaagccagccagtcgatgggactgccactccaaccagacggcattccatggctgcatggagctgctcaaggtggatggtcaactggtcaacctgactctggtggagggccggcggcttggattctatgctgaggtcctctttgatacatgtggcatcactgataggtacccagaagcccctaacaagagatgacccctccaaagccctcttccctggtctcccagtaggaatggcctctttcaataatctcccttctccttgtctctgctccttagtcccctgcttggggatgattcttctttgatctcttacctcctatttcttcccttaaggtgatacatgctcaggatggaaatgacacatttgcttttggtcctagaggggttttttgtgctagggggatgataggggtagaataaggcatgttttgatgttttcaggaagggggaatagtagtacttgagccctgaggactgcctagtgcccctgcatctgcgcttatacccggctggctaggcggggtgtgtctcaccgggttctggggcttcaaggagctgggagtgaagcttgcagggatcagaccccactctccagctcccagtaaggctccttcccttggtcctgaccccttccctaggtgcagccctaacatgtgtgagcatgatggacgctgctaccagtcttgggatgacttcatttgctactgcgaactgacgggctacaagggagagacctgccacacacgtaagccagatgtggtatggggggagtcagggacaagggaggtcaatagaaggttgctggggatcatcaggctgctagagatggcgaggatggcccttccagccctctcgctttttgtttttggtttttttgagacagagtcttgctctgttgcccaggctagagtgcagtggtgccatctgggctcgctgcaacctctgcctcctgggttcaagcgattctcctgcctcagcctcctaagtagctgggactacaggtgcacaccaccacgcctagctaatttttatatttttattagagatggggtttcaccatgttggccaggctggtctcgaactcctgacctcgggtgatgcaccaccccggcctcccaaagtgctgggattacaggcccgagccgccgcacctggccagccctctaactctctaactgcctttgtctcaacctattatctgccagctttgtataaggaatcctgtgaggcttatcggctcagtgggaaaacttctggaaacttcaccattgatcctgatggcagtggccccctgaagccatttgtagtgtactgtgatatccgaggtaagtgtctctgttgggtggtgagggggtgaggggagaaccaggaaggatagagtggtgggtgggggccagttagactaaacaagtgagggtaaaggaggacagaggggaagggcatactgaggaatttgtaacctagccttaaaagtaaatcccaagccaggcgtggtggctcacacctgtaatcccagcactttgggaagctactcgggaggttgaggcaggagaatcacttgaacctgggaggtggaggttgcagtgagctgagatagcgccattggactccagcctgggcaacagagcgagacttcatctcaaaaaaaaaaaaaaaaaaagtatatcccagcttccttacccattccagctatcttatttccagcctacaatgcagagtgcccagggcagaggtggaatggagctgctggccacgttcagtggctctgagttgcagcagcggtggtggaggtgggcagggagatgggtagagaatgcccaactccagccaaagctctgtcccctcttgtctgccagagaaccgagcgtggacagttgtgcggcatgacaggctgtggacaactcgagtgacaggttccagcatggagcggccattcctgggggctatccagtactggaatgcatcctgggaggaagtcagtgcccttgccaatgcttcccagcattgtgaacagtggatcgagttctcctgctacaattcccggctgctcaacactgcaggttagggctggggtcagggaggtggcggaactggaggagacaccaatgggggcctgggagaaggaagccagagagccagctggggccttgggttggaagattcaaggaggggtctgaactcgctggaagggcgagaggagcccagaggctaatggagggacagggcctggaagctgcctgcacctcttccccaggaggctacccctacagcttttggattggccgaaatgaggagcagcacttctactggggaggctcccagcctgggatccagcgctgtgcctgtggtctggaccggagctgtgtggaccctgccttgtactgcaactgtgacgctgaccagccccagtggtgagggggcaaagggacagggtttttaggactccgggagtgggaggagctgagtggctggggctgagccatgacatcctgcccccacaggagaactgacaagggactgctgacctttgtggaccatctgcctgtcactcaggtagtgataggggatacgaaccgctccacttctgaggcccagttcttcctgaggcctctgcgctgctatggcgatcgtgagtggcagtccccttttgtgtgccctcccagagctgactctccagtttccaaaatctaggccgcatgtcactggtggtctctagctggggtgcccgacccccagctcctgctgtgatgcgatctcattacccctctgcacctggctcctctttcattccactccttagtctcccctccgtcacctcaaaccctccccctttgcccaaccttccctgcccccaaccccaggttctcttcctcctccaccctccaatctccctgacaagaccttcctccatctgcttttctaggaaattcctggaacaccatttccttccacaccggggctgcactacgcttccccccaatccgtgccaaccacagcctggatgtctccttctacttcaggacctctgctccctcgggggtcttcctagagaatatggggggcccttactgccagtggcgccgaccttatgtgcgggtggaactcaacagtgagcaggcagactgtgggagggcctcggggtagatgaaagtgctgtctggggagacaggggtaggctggggttggagccaagggcagatgcccttttgacaggcagcatgggaagggttgagataccctatgttctagccctcactcggtcttgacggctggctgggtgaccctaggcattcacttggcctctcttggccttaagccccttccttgtgccataaggaagctggaccttcgagtccctctcaccgctgattagccatgcttctagcctgggaagtgaggctgggaagctggcttcagggatctgtgatgtggggagagacaaagggtatgaggtttttaagcagctggtaagtttcaatgcaagctacagacaaattggagggatattcaagaagctccaaagaggtgagggaaagaggttatattgggcaaggatctatgaagggtcttgtaggtctgagtccttttctcccctaccctgcatcacactgtccagcatcccgggatgtggtcttcgcctttgatgtggggaatggggatgagaacctcacagtacactcagacgactttgagttcaatgatgacgagtggcacctggtccgggctgaaatcaacgtgaagcaggcccggctccgagtggatcaccggccctgggttctgcggcctatgccactgcagacctacatctggatggagtatgaccagcccctctatgtgggtaagcagcaacccagaggcaagtctgaagcctcctttacctccccatcctccaaggccactcgccttgtttccaggagcctcctgtcttaggtgccagtcccctctgcttcagagcaagccagtgtctcacttgtccctccaggcctttgtatcctattctattcttccagccctcttggctccctttccaactacaatacttcatcctgtctctggctctgcctccatttcttttcttttttttttttttttgagacggagtctcgctctgtcacccaggctggagtgcagtggcacgatctcggcccactgcaagctccgcctcctgggttcaagcagttctcctgcctcagcctcccgagtagctgggactacaggcgcccgccaccgtgcccagctaattttttttgtattttttagtagagacggggtttcatcatgttagccaggatggtctcgatctcctgagctcgtgattcgcccgcctcggcctcccaaagtgctgggattacaggcgtgagccaccgcgcctggccctgcctccatttcttgacctgttgcctacccttcccaggatctgcagagcttaagagacgcccctttgtgggttgcttgagggccatgcgtctgaacggagtgactctgaacctggagggccgtgccaatgcctctgagggtacctcacccaactgcacaggccactgtgcccaccctcggctcccctgtttccatggaggccgctgcgtggagcgctatagctactacacgtgtgactgtgacctcacggcttttgatgggccatactgcaaccacggtaagtgctgctggttatggggcaacagggagccatagggtgtaatgggatgtagggagggcagggaaggaaatagcatgtaaagcccatatcatggaaaattagagttgtccctggattcctgagctctgagtttggggagttaggcagttgaagatcatgggtgactccaaaggcatggacaaggaagggatggtacagatagctggtgcaaaaatatctcaaaatcaccaagtatgctttgggagcccaaggtgggaggattgcttgaggctaggagttcgagaccagcctgggcaacatggcaagaccctgtctctacaaaaaaaattctttttttttttatgagatggaatctcgctctgtcacccaggctagagtacagtggcacgatctcggctcactgcaacctccgcctggttcaagcgattcttttgcctcagcctcccgagtagctaggactacagatgtgcaccaccatgcctggctaatttttgtatttttagtggagatggggtttcaccacattggccaggctggtctcgaactcttgaccttgtgatctgcctgcctcagactcccaaagtgctgggattacaggcgtgagccaccgcgtctggccaaaataatttcttttttcttttttttttttgagactgagtttcactcttgttgcccaggctggagtgtaatgactcgatctcggctcactgcaacctccacctcccgggctgaagcgattctcctgcctcagccttccaagtagctgggattacaagtgtgtgccaccacacccggctaatttttgtatttttagtagagatggggtttcaccacgcttgccaggctggtcacgaacttctgaccgcaggtgatccacccaccttggcctcccaaagtgctgggattacagacgtgagccacagcgcctggcaaaattttttaattagctgggcatggtggtgcacacttaggcctagctactcgggaggctgaggtgggaggatcacttgcacctaggaggtcaaggctgcagtgagctatgatcgtgccactgcactccagcctggggggcacagcaaggactgtgtctacaaaaaaaaaaaaagcaaatcgcttctccatcttcccaccatcaccatggtaacacaggcgaactcccttgtcaatgtatttgatgattgctgcattcctaaaacatgtcaatgacccagttcttggttaaggtgagccttgacattccccatagcaagatcctacacacatgccaagactgcatcctccctaaggctggcctatagggaggatatatgagcaggtgggttactggtgggaggagtgtgggggactagggagatacaagacttagggaccaacagatttctggtggtggtttggaagtgtgagtagtggcacatatactacatggggtcaggatatccccatcacccaggctggagtgcagtggcatgatcttggctcactgcaacctctgccccctgggctcaagcaattctcctgccttggctttcctatagtagctgggattacaggcatgcactaccacacctagctaagttttgtatttttagtagagatggggttttgccatgttggccaggctgttctcgaactcctgacctcaagatgatctgcctgccttggcctcccaaagtgctgggattacaggtgtgagccactgtgcctggccttactgcgtgtctttaagcaagtcactactcatctctgagcctgtttccccatttgtaaaatgcaggggttggatcagatgatctccagtttcccatggctgtaagattctgttctgtgacagaggggctcaaggggacctaaaagtaaatggagggttgtgagggtggcagaaactgaagtaagtctcaggatgtgtgtatggatgacataaaacctctgaattggggagtgagcagtgtgggggccctaacctccctgcttctacctgcagatattggtggtttctttgagccgggcacctggatgcgctataacctacagtcagcgctgcgctctgcagccagggagttctcccacatgctgagccggccagtgccaggctatgagcctggctacatcccgggctatgatactccgggctatgtgcctggctaccatggccccgggtaccgcctgcccgactacccccggcctggtcggcctgtgcccggttaccgtgggcctgtctacaacgttacgggagaggaggtctccttcagcttcagcaccagctccgcccctgctgtcctgctctacgtcagttcctttgttcgtgactacatggctgtgctcatcaaggatgatggtaagctctcccgggctctctcaccccactccagcttcaccccggtgcccctaattctcctattgattcacaaatacaaggacccacgtgctgttagaagataggagtcatggggcctgagaccccaaatttcttctccccaccccacagggacccttcagctgcgatatcagctgggcaccagtccctacgtgtaccagctaaccactcgaccagtgaccgatggccagccccatagcatcaatatcacccgtgtttaccggaac
